(19) United States
(12) Patent Application Publication
(10) Pub. No.: US 2007/0049743 A1
(43) Pub. Date: Mar. 1, 2007

(54) Novel nucleic acids and polypeptides

(76) Inventors: Y. Tom Tang, San Jose, CA (US); Chenghua Liu, San Jose, CA (US); Vinod Asundi, Foster City, CA (US); Rui-Hung Chen, Foster City, CA (US); Feiyan Ren, Cupertino, CA (US); Jian-Rui Wang, Cupertino, CA (US); Tom Wehrman, Stanford, CA (US); Aidong Xue, Sunnyvale, CA (US); Yonghong Yang, San Jose, CA (US); Jie Zhang, Campbell, CA (US); Qing A. Zhao, San Jose, CA (US); Ping Zhou, Cupertino, CA (US); Radoje T. Drmanac, Palo Alto, CA (US); Ryle W. Goodrich, Los Angeles, CA (US)

Correspondence Address: Luisa Bigornia;HYSEQ, INC., 670 Almanor Avenue, Sunnyvale, CA, 94085, US

(21) Appl. No.: 10/294,433

(22) Filed: Nov. 13, 2002

Related U.S. Application Data
(63) Continuation-in-part of application No. PCT/US01/14826, filed on May 16, 2001.
(63) Continuation-in-part of application No. 09/989,600, filed on Nov. 20, 2001, now Pat. No. 6,626,167.
Application No. 09/989,600 is a continuation of application No. 09/577,408, filed on May 18, 2000, now abandoned.

(51) Int. Cl. C07K 14/47; C12P 21/06; C07H 21/04

(52) U.S. Cl. 536/23.1; 435/69.1; 530/350; 435/320.1; 435/325

(57) ABSTRACT

The present invention provides novel nucleic acids, novel polypeptide sequences encoded by these nucleic acids and uses thereof.

[0001] This application is a continuation-in-part of each of PCT/US01/14826 filed May 16, 2001, Docket No. 792CIP2A-2D/PCT; U.S. application Ser. No. 09/989,600 filed Nov. 21, 2001, Docket No. 792CON which is a continuation of U.S. application Ser. No. 09/577,408 filed May 18, 2000, Docket No. 792; U.S. application Ser. No. 10/115,831 filed Apr. 2, 2002, Docket No. 792CIP2ADV1, which is a division of U.S. application Ser. No. 09/667,298 filed Sep. 22, 2000, Docket No. 792CIP2A; U.S. application Ser. No. 09/695,781 filed Oct. 24, 2000, Docket No. 792CIP2B; U.S. application Ser. No. 10/150,802 filed May 15, 2002, Docket No. 792CIP2CDV1, which is a division of U.S. application Ser. No. 09/715,869 filed Nov. 17, 2000, Docket No. 792CIP2C, now abandoned; U.S. application Ser. No. 10/167,379 filed Jun. 10, 2002, Docket No. 792CIP2DDV1, which is a division of U.S. application Ser. No. 09/775,330 filed Feb. 1, 2001, Docket No. 792CIP2D, all of which are incorporated herein by reference in their entirety, specifically including, but not limited to, incorporation by reference of the tables in each application displaying sequence information, homology information, ematrix signatures, pfam signatures, signal peptide information, transmembrane domain information, chromosomal localization and tissue distribution information, and/or 3-dimensional structural information.

### 1. TECHNICAL FIELD

[0002] The present invention provides novel polynucleotides and proteins encoded by such polynucleotides, along with uses for these polynucleotides and proteins, for example in therapeutic, diagnostic and research methods.

### 2. BACKGROUND

[0003] Technology aimed at the discovery of protein factors (including e.g., cytokines, such as lymphokines, interferons, circulating soluble factors, chemokines, and interleukins) has matured rapidly over the past decade. The now routine hybridization cloning and expression cloning techniques clone novel polynucleotides “directly” in the sense that they rely on information directly related to the discovered protein (i.e., partial DNA/amino acid sequence of the protein in the case of hybridization cloning; activity of the protein in the case of expression cloning). More recent “indirect” cloning techniques such as signal sequence cloning, which isolates DNA sequences based on the presence of a now well-recognized secretory leader sequence motif, as well as various PCR-based or low stringency hybridization-based cloning techniques, have advanced the state of the art by making available large numbers of DNA/amino acid sequences for proteins that are known to have biological activity, for example, by virtue of their secreted nature in the case of leader sequence cloning, by virtue of their cell or tissue source in the case of PCR-based techniques, or by virtue of structural similarity to other genes of known biological activity.

[0004] Identified polynucleotide and polypeptide sequences have numerous applications in, for example, diagnostics, forensics, gene mapping; identification of mutations responsible for genetic disorders or other traits, to assess biodiversity, and to produce many other types of data and products dependent on DNA and amino acid sequences.

### 3. SUMMARY OF THE INVENTION

[0005] The compositions of the present invention include novel isolated polypeptides, novel isolated polynucleotides encoding such polypeptides, including recombinant DNA molecules, cloned genes or degenerate variants thereof, especially naturally occurring variants such as allelic variants, antisense polynucleotide molecules, and antibodies that specifically recognize one or more epitopes present on such polypeptides, as well as hybridomas producing such antibodies.

[0006] The compositions of the present invention additionally include vectors, including expression vectors, containing the polynucleotides of the invention, cells genetically engineered to contain such polynucleotides and cells genetically engineered to express such polynucleotides.

[0007] The present invention relates to a collection or library of at least one novel nucleic acid sequence assembled from expressed sequence tags (ESTs) isolated mainly by sequencing by hybridization (SBH), and in some cases, sequences obtained from one or more public databases. The invention relates also to the proteins encoded by such polynucleotides, along with therapeutic, diagnostic and research utilities for these polynucleotides and proteins. These nucleic acid sequences are designated as SEQ ID NO: 1-216, or 433-648. The polypeptides sequences are designated SEQ ID NO: 217-432, or 649-864. The nucleic acids and polypeptides are provided in the Sequence Listing. In the nucleic acids provided in the Sequence Listing, A is adenosine; C is cytosine; G is guanine; T is thymine; and N is unknown or any of the four bases. In the amino acids provided in the Sequence Listing, and Table 6, * corresponds to the stop codon.

[0008] The nucleic acid sequences of the present invention also include, nucleic acid sequences that hybridize to the complement of SEQ ID NO: 1-216, or 433-648 under stringent hybridization conditions; nucleic acid sequences which are allelic variants or species homologues of any of the nucleic acid sequences recited above, or nucleic acid sequences that encode a peptide comprising a specific domain or truncation of the peptides encoded by SEQ ID NO: 1-216, or 433-648. A polynucleotide comprising a nucleotide sequence having at least 90% identity to an identifying sequence of SEQ ID NO: 1-216, or 433-648 or a degenerate variant or fragment thereof. The identifying sequence can be 100 base pairs in length.

[0009] The nucleic acid sequences of the present invention also include the sequence information from the nucleic acid sequences of SEQ ID NO: 1-216, or 433-648. The sequence information can be a segment of any one of SEQ ID NO: 1-216, or 433-648 that uniquely identifies or represents the sequence information of SEQ ID NO: 1-216, or 433-648.

[0010] A collection as used in this application can be a collection of only one polynucleotide. The collection of sequence information or identifying information of each sequence can be provided on a nucleic acid array. In one embodiment, segments of sequence information are provided on a nucleic acid array to detect the polynucleotide that contains the segment. The array can be designed to detect full-match or mismatch to the polynucleotide that contains the segment. The collection can also be provided in a computer-readable format.

[0011] This invention also includes the reverse or direct complement of any of the nucleic acid sequences recited above; cloning or expression vectors containing the nucleic acid sequences; and host cells or organisms transformed with these expression vectors. Nucleic acid sequences (or their reverse or direct complements) according to the invention have numerous applications in a variety of techniques known to those skilled in the art of molecular biology, such as use as hybridization probes, use as primers for PCR, use in an array, use in computer-readable media, use in sequencing full-length genes, use for chromosome and gene mapping, use in the recombinant production of protein, and use in the generation of anti-sense DNA or RNA, their chemical analogs and the like.

[0012] In a preferred embodiment, the nucleic acid sequences of SEQ ID NO: 1-216, or 433-648 or novel segments or parts of the nucleic acids of the invention are used as primers in expression assays that are well known in the art. In a particularly preferred embodiment, the nucleic acid sequences of SEQ ID NO: 1-216, or 433-648 or novel segments or parts of the nucleic acids provided herein are used in diagnostics for identifying expressed genes or, as well known in the art and exemplified by Vollrath et al., Science 258:52-59 (1992), as expressed sequence tags for physical mapping of the human genome.

[0013] The isolated polynucleotides of the invention include, but are not limited to, a polynucleotide comprising any one of the nucleotide sequences set forth in SEQ ID NO: 1-216, or 433-648; a polynucleotide comprising any of the full length protein coding sequences of SEQ ID NO: 1-216, or 433-648; and a polynucleotide comprising any of the nucleotide sequences of the mature protein coding sequences of SEQ ID NO: 1-216, or 433-648. The polynucleotides of the present invention also include, but are not limited to, a polynucleotide that hybridizes under stringent hybridization conditions to (a) the complement of any one of the nucleotide sequences set forth in SEQ ID NO: 1-216, or 433-648; (b) a nucleotide sequence encoding any one of the amino acid sequences set forth in the Sequence Listing; (c) a polynucleotide which is an allelic variant of any polynucleotides recited above; (d) a polynucleotide which encodes a species homolog (e.g. orthologs) of any of the proteins recited above; or (e) a polynucleotide that encodes a polypeptide comprising a specific domain or truncation of any of the polypeptides comprising an amino acid sequence set forth in the Sequence Listing.

[0014] The isolated polypeptides of the invention include, but are not limited to, a polypeptide comprising any of the amino acid sequences set forth in SEQ ID NO: 217-432, or 649-864; or the corresponding full length or mature protein. Polypeptides of the invention also include polypeptides with biological activity that are encoded by (a) any of the polynucleotides having a nucleotide sequence set forth in SEQ ID NO: 1-216, or 433-648; or (b) polynucleotides that hybridize to the complement of the polynucleotides of (a) under stringent hybridization conditions. Biologically or immunologically active variants of any of the polypeptide sequences in the Sequence Listing, and “substantial equivalents” thereof (e.g., with at least about 65%, 70%, 75%, 80%, 85%, 90%, 95%, 98% or 99% amino acid sequence identity) that preferably retain biological activity are also contemplated. The polypeptides of the invention may be wholly or partially chemically synthesized but are preferably produced by recombinant means using the genetically engineered cells (e.g. host cells) of the invention.

[0015] The invention also provides compositions comprising a polypeptide of the invention. Polypeptide compositions of the invention may further comprise an acceptable carrier, such as a hydrophilic, e.g., pharmaceutically acceptable, carrier.

[0016] The invention also provides host cells transformed or transfected with a polynucleotide of the invention.

[0017] The invention also relates to methods for producing a polypeptide of the invention comprising growing a culture of the host cells of the invention in a suitable culture medium under conditions permitting expression of the desired polypeptide, and purifying the polypeptide from the culture or from the host cells. Preferred embodiments include those in which the protein produced by such process is a mature form of the protein.

[0018] Polynucleotides according to the invention have numerous applications in a variety of techniques known to those skilled in the art of molecular biology. These techniques include use as hybridization probes, use as oligomers, or primers, for PCR, use for chromosome and gene mapping, use in the recombinant production of protein, and use in generation of anti-sense DNA or RNA, their chemical analogs and the like. For example, when the expression of an mRNA is largely restricted to a particular cell or tissue type, polynucleotides of the invention can be used as hybridization probes to detect the presence of the particular cell or tissue mRNA in a sample using, e.g., in situ hybridization.

[0019] In other exemplary embodiments, the polynucleotides are used in diagnostics as expressed sequence tags for identifying expressed genes or, as well known in the art and exemplified by Vollrath et al., Science 258:52-59 (1992), as expressed sequence tags for physical mapping of the human genome.

[0020] The polypeptides according to the invention can be used in a variety of conventional procedures and methods that are currently applied to other proteins. For example, a polypeptide of the invention can be used to generate an antibody that specifically binds the polypeptide. Such antibodies, particularly monoclonal antibodies, are useful for detecting or quantitating the polypeptide in tissue. The polypeptides of the invention can also be used as molecular weight markers, and as a food supplement.

[0021] Methods are also provided for preventing, treating, or ameliorating a medical condition which comprises the step of administering to a mammalian subject a therapeutically effective amount of a composition comprising a polypeptide of the present invention and a pharmaceutically acceptable carrier.

[0022] In particular, the polypeptides and polynucleotides of the invention can be utilized, for example, in methods for the prevention and/or treatment of disorders involving aberrant protein expression or biological activity.

[0023] The present invention further relates to methods for detecting the presence of the polynucleotides or polypeptides of the invention in a sample. Such methods can, for example, be utilized as part of prognostic and diagnostic evaluation of disorders as recited herein and for the identification of subjects exhibiting a predisposition to such conditions. The invention provides a method for detecting the polynucleotides of the invention in a sample, comprising contacting the sample with a compound that binds to and forms a complex with the polynucleotide of interest for a period sufficient to form the complex and under conditions sufficient to form a complex and detecting the complex such that if a complex is detected, the polynucleotide of interest is detected. The invention also provides a method for detecting the polypeptides of the invention in a sample comprising contacting the sample with a compound that binds to and forms a complex with the polypeptide under conditions and for a period sufficient to form the complex and detecting the formation of the complex such that if a complex is formed, the polypeptide is detected.

[0024] The invention also provides kits comprising polynucleotide probes and/or monoclonal antibodies, and optionally quantitative standards, for carrying out methods of the invention. Furthermore, the invention provides methods for evaluating the efficacy of drugs, and monitoring the progress of patients, involved in clinical trials for the treatment of disorders as recited above.

[0025] The invention also provides methods for the identification of compounds that modulate (i.e., increase or decrease) the expression or activity of the polynucleotides and/or polypeptides of the invention. Such methods can be utilized, for example, for the identification of compounds that can ameliorate symptoms of disorders as recited herein. Such methods can include, but are not limited to, assays for identifying compounds and other substances that interact with (e.g., bind to) the polypeptides of the invention. The invention provides a method for identifying a compound that binds to the polypeptides of the invention comprising contacting the compound with a polypeptide of the invention in a cell for a time sufficient to form a polypeptide/compound complex, wherein the complex drives expression of a reporter gene sequence in the cell; and detecting the complex by detecting the reporter gene sequence expression such that if expression of the reporter gene is detected the compound the binds to a polypeptide of the invention is identified.

[0026] The methods of the invention also provide methods for treatment which involve the administration of the polynucleotides or polypeptides of the invention to individuals exhibiting symptoms or tendencies. In addition, the invention encompasses methods for treating diseases or disorders as recited herein comprising administering compounds and other substances that modulate the overall activity of the target gene products. Compounds and other substances can effect such modulation either on the level of target gene/protein expression or target protein activity.

[0027] The polypeptides of the present invention and the polynucleotides encoding them are also useful for the same functions known to one of skill in the art as the polypeptides and polynucleotides to which they have homology (set forth in Table 2); for which they have a signature region (as set forth in Table 3); or for which they have homology to a gene family (as set forth in Table 4). If no homology is set forth for a sequence, then the polypeptides and polynucleotides of the present invention are useful for a variety of applications, as described herein, including use in arrays for detection.

### 4. DETAILED DESCRIPTION OF THE INVENTION

### 4.1 Definitions

[0028] It must be noted that as used herein and in the appended claims, the singular forms “a”, “an” and “the” include plural references unless the context clearly dictates otherwise.

[0029] The term “active” refers to those forms of the polypeptide which retain the biologic and/or immunologic activities of any naturally occurring polypeptide. According to the invention, the terms “biologically active” or “biological activity” refer to a protein or peptide having structural, regulatory or biochemical functions of a naturally occurring molecule. Likewise “immunologically active” or “immunological activity” refers to the capability of the natural, recombinant or synthetic polypeptide to induce a specific immune response in appropriate animals or cells and to bind with specific antibodies.

[0030] The term “activated cells” as used in this application are those cells which are engaged in extracellular or intracellular membrane trafficking, including the export of secretory or enzymatic molecules as part of a normal or disease process.

[0031] The terms “complementary” or “complementarity” refer to the natural binding of polynucleotides by base pairing. For example, the sequence 5′-AGT-3′ binds to the complementary sequence 3′-TCA-5′. Complementarity between two single-stranded molecules may be “partial” such that only some of the nucleic acids bind or it may be “complete” such that total complementarity exists between the single stranded molecules. The degree of complementarity between the nucleic acid strands has significant effects on the efficiency and strength of the hybridization between the nucleic acid strands.

[0032] The term “embryonic stem cells (ES)” refers to a cell that can give rise to many differentiated cell types in an embryo or an adult, including the germ cells. The term “germ line stem cells (GSCs)” refers to stem cells derived from primordial stem cells that provide a steady and continuous source of germ cells for the production of gametes. The term “primordial germ cells (PGCs)” refers to a small population of cells set aside from other cell lineages particularly from the yolk sac, mesenteries, or gonadal ridges during embryogenesis that have the potential to differentiate into germ cells and other cells. PGCs are the source from which GSCs and ES cells are derived. The PGCs, the GSCs and the ES cells are capable of self-renewal. Thus these cells not only populate the germ line and give rise to a plurality of terminally differentiated cells that comprise the adult specialized organs, but are able to regenerate themselves.

[0033] The term “expression modulating fragment,” EMF, means a series of nucleotides which modulates the expression of an operably linked ORF or another EMF.

[0034] As used herein, a sequence is said to “modulate the expression of an operably linked sequence” when the expression of the sequence is altered by the presence of the EMF. EMFs include, but are not limited to, promoters, and promoter modulating sequences (inducible elements). One class of EMFs are nucleic acid fragments which induce the expression of an operably linked ORF in response to a specific regulatory factor or physiological event.

[0035] The terms “nucleotide sequence” or “nucleic acid” or “polynucleotide” or “oligonculeotide” are used interchangeably and refer to a heteropolymer of nucleotides or the sequence of these nucleotides. These phrases also refer to DNA or RNA of genomic or synthetic origin which may be single-stranded or double-stranded and may represent the sense or the antisense strand, to peptide nucleic acid (PNA) or to any DNA-like or RNA-like material. In the sequences herein A is adenine, C is cytosine, T is thymine, G is guanine and N is A, C, G or T (U). It is contemplated that where the polynucleotide is RNA, the T (thymine) in the sequences provided herein is substituted with U (uracil). Generally, nucleic acid segments provided by this invention may be assembled from fragments of the genome and short oligonucleotide linkers, or from a series of oligonucleotides, or from individual nucleotides, to provide a synthetic nucleic acid which is capable of being expressed in a recombinant transcriptional unit comprising regulatory elements derived from a microbial or viral operon, or a eukaryotic gene.

[0036] The terms “oligonucleotide fragment” or a “polynucleotide fragment”, “portion,” or “segment” or “probe” or “primer” are used interchangeably and refer to a sequence of nucleotide residues which are at least about 5 nucleotides, more preferably at least about 7 nucleotides, more preferably at least about 9 nucleotides, more preferably at least about 11 nucleotides and most preferably at least about 17 nucleotides. The fragment is preferably less than about 500 nucleotides, preferably less than about 200 nucleotides, more preferably less than about 100 nucleotides, more preferably less than about 50 nucleotides and most preferably less than 30 nucleotides. Preferably the probe is from about 6 nucleotides to about 200 nucleotides, preferably from about 15 to about 50 nucleotides, more preferably from about 17 to 30 nucleotides and most preferably from about 20 to 25 nucleotides. Preferably the fragments can be used in polymerase chain reaction (PCR), various hybridization procedures or microarray procedures to identify or amplify identical or related parts of mRNA or DNA molecules. A fragment or segment may uniquely identify each polynucleotide sequence of the present invention. Preferably the fragment comprises a sequence substantially similar to any one of SEQ ID NO: 1-216, or 433-648.

[0037] Probes may, for example, be used to determine whether specific mRNA molecules are present in a cell or tissue or to isolate similar nucleic acid sequences from chromosomal DNA as described by Walsh et al. (Walsh, P. S. et al., 1992, PCR Methods Appl 1:241-250). They may be labeled by nick translation, Klenow fill-in reaction, PCR, or other methods well known in the art. Probes of the present invention, their preparation and/or labeling are elaborated in Sambrook, J. et al., 1989, Molecular Cloning: A Laboratory Manual, Cold Spring Harbor Laboratory, NY; or Ausubel, F. M. et al., 1989, Current Protocols in Molecular Biology, John Wiley & Sons, New York N.Y., both of which are incorporated herein by reference in their entirety.

[0038] The nucleic acid sequences of the present invention also include the sequence information from the nucleic acid sequences of SEQ ID NO: 1-216, or 433-648. The sequence information can be a segment of any one of SEQ ID NO: 1-216, or 433-648 that uniquely identifies or represents the sequence information of that sequence of SEQ ID NO: 1-216, or 433-648. One such segment can be a twenty-mer nucleic acid sequence because the probability that a twenty-mer is fully matched in the human genome is 1 in 300. In the human genome, there are three billion base pairs in one set of chromosomes. Because 4²⁰ possible twenty-mers exist, there are 300 times more twenty-mers than there are base pairs in a set of human chromosomes. Using the same analysis, the probability for a seventeen-mer to be fully matched in the human genome is approximately 1 in 5. When these segments are used in arrays for expression studies, fifteen-mer segments can be used. The probability that the fifteen-mer is fully matched in the expressed sequences is also approximately one in five because expressed sequences comprise less than approximately 5% of the entire genome sequence.

[0039] Similarly, when using sequence information for detecting a single mismatch, a segment can be a twenty-five mer. The probability that the twenty-five mer would appear in a human genome with a single mismatch is calculated by multiplying the probability for a full match (1÷4²⁵) times the increased probability for mismatch at each nucleotide position (3×25). The probability that an eighteen mer with a single mismatch can be detected in an array for expression studies is approximately one in five. The probability that a twenty-mer with a single mismatch can be detected in a human genome is approximately one in five.

[0040] The term “open reading frame,” ORF, means a series of nucleotide triplets coding for amino acids without any termination codons and is a sequence translatable into protein.

[0041] The terms “operably linked” or “operably associated” refer to functionally related nucleic acid sequences. For example, a promoter is operably associated or operably linked with a coding sequence if the promoter controls the transcription of the coding sequence. While operably linked nucleic acid sequences can be contiguous and in the same reading frame, certain genetic elements e.g. repressor genes are not contiguously linked to the coding sequence but still control transcription/translation of the coding sequence.

[0042] The term “pluripotent” refers to the capability of a cell to differentiate into a number of differentiated cell types that are present in an adult organism. A pluripotent cell is restricted in its differentiation capability in comparison to a totipotent cell.

[0043] The terms “polypeptide” or “peptide” or “amino acid sequence” refer to an oligopeptide, peptide, polypeptide or protein sequence or fragment thereof and to naturally occurring or synthetic molecules. A polypeptide “fragment,” “portion,” or “segment” is a stretch of amino acid residues of at least about 5 amino acids, preferably at least about 7 amino acids, more preferably at least about 9 amino acids and most preferably at least about 17 or more amino acids. The peptide preferably is not greater than about 500 amino acids, more preferably less than 200 amino acids more preferably less than 150 amino acids and most preferably less than 100 amino acids. Preferably the peptide is from about 5 to about 200 amino acids. To be active, any polypeptide must have sufficient length to display biological and/or immunological activity.

[0044] The term “naturally occurring polypeptide” refers to polypeptides produced by cells that have not been genetically engineered and specifically contemplates various polypeptides arising from post-translational modifications of the polypeptide including, but not limited to, acetylation, carboxylation, glycosylation, phosphorylation, lipidation and acylation.

[0045] The term “translated protein coding portion” means a sequence which encodes for the fill length protein which may include any leader sequence or any processing sequence.

[0046] The term “mature protein coding sequence” means a sequence which encodes a peptide or protein without a signal or leader sequence. The “mature protein portion” means that portion of the protein which does not include a signal or leader sequence. The peptide may have been produced by processing in the cell which removes any leader/signal sequence. The mature protein portion may or may not include an initial methionine residue. The methionine residue may be removed from the protein during processing in the cell. The peptide may be produced synthetically or the protein may have been produced using a polynucleotide only encoding for the mature protein coding sequence.

[0047] The term “derivative” refers to polypeptides chemically modified by such techniques as ubiquitination, labeling (e.g., with radionuclides or various enzymes), covalent polymer attachment such as pegylation (derivatization with polyethylene glycol) and insertion or substitution by chemical synthesis of amino acids such as ornithine, which do not normally occur in human proteins.

[0048] The term “variant” (or “analog”) refers to any polypeptide differing from naturally occurring polypeptides by amino acid insertions, deletions, and substitutions, created using, e g., recombinant DNA techniques. Guidance in determining which amino acid residues may be replaced, added or deleted without abolishing activities of interest, may be found by comparing the sequence of the particular polypeptide with that of homologous peptides and minimizing the number of amino acid sequence changes made in regions of high homology (conserved regions) or by replacing amino acids with consensus sequence.

[0049] Alternatively, recombinant variants encoding these same or similar polypeptides may be synthesized or selected by making use of the “redundancy” in the genetic code. Various codon substitutions, such as the silent changes which produce various restriction sites, may be introduced to optimize cloning into a plasmid or viral vector or expression in a particular prokaryotic or eukaryotic system. Mutations in the polynucleotide sequence may be reflected in the polypeptide or domains of other peptides added to the polypeptide to modify the properties of any part of the polypeptide, to change characteristics such as ligand-binding affinities, interchain affinities, or degradation/turnover rate.

[0050] Preferably, amino acid “substitutions” are the result of replacing one amino acid with another amino acid having similar structural and/or chemical properties, i.e., conservative amino acid replacements. “Conservative” amino acid substitutions may be made on the basis of similarity in polarity, charge, solubility, hydrophobicity, hydrophilicity, and/or the amphipathic nature of the residues involved. For example, nonpolar (hydrophobic) amino acids include alanine, leucine, isoleucine, valine, proline, phenylalanine, tryptophan, and methionine; polar neutral amino acids include glycine, serine, threonine, cysteine, tyrosine, asparagine, and glutamine; positively charged (basic) amino acids include arginine, lysine, and histidine; and negatively charged (acidic) amino acids include aspartic acid and glutamic acid. “Insertions” or “deletions” are preferably in the range of about 1 to 20 amino acids, more preferably 1 to 10 amino acids. The variation allowed may be experimentally determined by systematically making insertions, deletions, or substitutions of amino acids in a polypeptide molecule using recombinant DNA techniques and assaying the resulting recombinant variants for activity.

[0051] Alternatively, where alteration of function is desired, insertions, deletions or non-conservative alterations can be engineered to produce altered polypeptides. Such alterations can, for example, alter one or more of the biological functions or biochemical characteristics of the polypeptides of the invention. For example, such alterations may change polypeptide characteristics such as ligand-binding affinities, interchain affinities, or degradation/turnover rate. Further, such alterations can be selected so as to generate polypeptides that are better suited for expression, scale up and the like in the host cells chosen for expression. For example, cysteine residues can be deleted or substituted with another amino acid residue in order to eliminate disulfide bridges.

[0052] The terms “purified” or “substantially purified” as used herein denotes that the indicated nucleic acid or polypeptide is present in the substantial absence of other biological macromolecules, e.g., polynucleotides, proteins, and the like. In one embodiment, the polynucleotide or polypeptide is purified such that it constitutes at least 95% by weight, more preferably at least 99% by weight, of the indicated biological macromolecules present (but water, buffers, and other small molecules, especially molecules having a molecular weight of less than 1000 daltons, can be present).

[0053] The term “isolated” as used herein refers to a nucleic acid or polypeptide separated from at least one other component (e.g., nucleic acid or polypeptide) present with the nucleic acid or polypeptide in its natural source. In one embodiment, the nucleic acid or polypeptide is found in, the presence of (if anything) only a solvent, buffer, ion, or other component normally present in a solution of the same. The terms “isolated” and “purified” do not encompass nucleic acids or polypeptides present in their natural source.

[0054] The term “recombinant,” when used herein to refer to a polypeptide or protein, means that a polypeptide or protein is derived from recombinant (e.g., microbial, insect, or mammalian) expression systems. “Microbial” refers to recombinant polypeptides or proteins made in bacterial or fungal (e.g., yeast) expression systems. As a product, “recombinant microbial” defines a polypeptide or protein essentially free of native endogenous substances and unaccompanied by associated native glycosylation. Polypeptides or proteins expressed in most bacterial cultures, e.g., E. coli, will be free of glycosylation modifications; polypeptides or proteins expressed in yeast will have a glycosylation pattern in general different from those expressed in mammalian cells.

[0055] The term “recombinant expression vehicle or vector” refers to a plasmid or phage or virus or vector, for expressing a polypeptide from a DNA (RNA) sequence. An expression vehicle can comprise a transcriptional unit comprising an assembly of (1) a genetic element or elements having a regulatory role in gene expression, for example, promoters or enhancers, (2) a structural or coding sequence which is transcribed into mRNA and translated into protein, and (3) appropriate transcription initiation and termination sequences. Structural units intended for use in yeast or eukaryotic expression systems preferably include a leader sequence enabling extracellular secretion of translated protein by a host cell. Alternatively, where recombinant protein is expressed without a leader or transport sequence, it may include an amino terminal methionine residue. This residue may or may not be subsequently cleaved from the expressed recombinant protein to provide a final product.

[0056] The term “recombinant expression system” means host cells which have stably integrated a recombinant transcriptional unit into chromosomal DNA or carry the recombinant transcriptional unit extrachromosomally. Recombinant expression systems as defined herein will express heterologous polypeptides or proteins upon induction of the regulatory elements linked to the DNA segment or synthetic gene to be expressed. This term also means host cells which have stably integrated a recombinant genetic element or elements having a regulatory role in gene expression, for example, promoters or enhancers. Recombinant expression systems as defined herein will express polypeptides or proteins endogenous to the cell upon induction of the regulatory elements linked to the endogenous DNA segment or gene to be expressed. The cells can be prokaryotic or eukaryotic.

[0057] The term “secreted” includes a protein that is transported across or through a membrane, including transport as a result of signal sequences in its amino acid sequence when it is expressed in a suitable host cell. “Secreted” proteins include without limitation proteins secreted wholly (e.g., soluble proteins) or partially (e.g., receptors) from the cell in which they are expressed. “Secreted” proteins also include without limitation proteins that are transported across the membrane of the endoplasmic reticulum. “Secreted” proteins are also intended to include proteins containing non-typical signal sequences (e.g. Interleukin-1 Beta, see Krasney, P. A. and Young, P. R. (1992) Cytokine 4(2): 134 -143) and factors released from damaged cells (e.g. Interleukin-1 Receptor Antagonist, see Arend, W. P. et. al. (1998) Annu. Rev. Immunol. 16:27-55)

[0058] Where desired, an expression vector may be designed to contain a “signal or leader sequence” which will direct the polypeptide through the membrane of a cell. Such a sequence may be naturally present on the polypeptides of the present invention or provided from heterologous protein sources by recombinant DNA techniques.

[0059] The term “stringent” is used to refer to conditions that are commonly understood in the art as stringent. Stringent conditions can include highly stringent conditions (i.e., hybridization to filter-bound DNA in 0.5 M NaHPO₄, 7% sodium dodecyl sulfate (SDS), 1 mM EDTA at 65° C., and washing in 0.1×SSC/0.1% SDS at 68° C.), and moderately stringent conditions (i.e., washing in 0.2×SSC/0.1% SDS at 42° C.). Other exemplary hybridization conditions are described herein in the examples.

[0060] In instances of hybridization of deoxyoligonucleotides, additional exemplary stringent hybridization conditions include washing in 6×SSC/0.05% sodium pyrophosphate at 37° C. (for 14-base oligonucleotides), 48° C. (for 17-base oligos), 55° C. (for 20-base oligonucleotides), and 60° C. (for 23-base oligonucleotides).

[0061] As used herein, “substantially equivalent” can refer both to nucleotide and amino acid sequences, for example a mutant sequence, that varies from a reference sequence by one or more substitutions, deletions, or additions, the net effect of which does not result in an adverse functional dissimilarity between the reference and subject sequences. Typically, such a substantially equivalent sequence varies from one of those listed herein by no more than about 35% (i.e., the number of individual residue substitutions, additions, and/or deletions in a substantially equivalent sequence, as compared to the corresponding reference sequence, divided by the total number of residues in the substantially equivalent sequence is about 0.35 or less). Such a sequence is said to have 65% sequence identity to the listed sequence. In one embodiment, a substantially equivalent, e.g., mutant, sequence of the invention varies from a listed sequence by no more than 30% (70% sequence identity); in a variation of this embodiment, by no more than 25% (75% sequence identity); and in a further variation of this embodiment, by no more than 20% (80% sequence identity) and in a further variation of this embodiment, by no more than 10% (90% sequence identity) and in a further variation of this embodiment, by no more that 5% (95% sequence identity). Substantially equivalent, e.g., mutant, amino acid sequences according to the invention preferably have at least 80% sequence identity with a listed amino acid sequence, more preferably at least 85% sequence identity, more preferably at least 90% sequence identity, more preferably at least 95% identity, more preferably at least 98% identity, and most preferably at least 99% identity. Substantially equivalent nucleotide sequences of the invention can have lower percent sequence identities, taking into account, for example, the redundancy or degeneracy of the genetic code. Preferably, nucleotide sequence has at least about 65% identity, more preferably at least about 75% identity, more preferably at least about 80% sequence identity, more preferably at least about 85% sequence identity, more preferably at least about 90% sequence identity, and most preferably at least about 95% identity, more preferably at least about 98% sequence identity, and most preferably at least about 99% sequence identity. For the purposes of the present invention, sequences having substantially equivalent biological activity and substantially equivalent expression characteristics are considered substantially equivalent. For the purposes of determining equivalence, truncation of the mature sequence (e.g., via a mutation which creates a spurious stop codon) should be disregarded. Sequence identity may be determined, e.g., using the Jotun Hein method (Hein, J. (1990) Methods Enzymol. 183:626-645). Identity between sequences can also be determined by other methods known in the art, e.g. by varying hybridization conditions.

[0062] The term “totipotent” refers to the capability of a cell to differentiate into all of the cell types of an adult organism.

[0063] The term “transformation” means introducing DNA into a suitable host cell so that the DNA is replicable, either as an extrachromosomal element, or by chromosomal integration. The term “transfection” refers to the taking up of an expression vector by a suitable host cell, whether or not any coding sequences are in fact expressed. The term “infection” refers to the introduction of nucleic acids into a suitable host cell by use of a virus or viral vector.

[0064] As used herein, an “uptake modulating fragment,” UMF, means a series of nucleotides which mediate the uptake of a linked DNA fragment into a cell. UMFs can be readily identified using known UMFs as a target sequence or target motif with the computer-based systems described below. The presence and activity of a UMF can be confirmed by attaching the suspected UMF to a marker sequence. The resulting nucleic acid molecule is then incubated with an appropriate host under appropriate conditions and the uptake of the marker sequence is determined. As described above, a UMF will increase the frequency of uptake of a linked marker sequence.

[0065] Each of the above terms is meant to encompass all that is described for each, unless the context dictates otherwise.

### 4.2 Nucleic Acids of the Invention

[0066] Nucleotide sequences of the invention are set forth in the Sequence Listing.

[0067] The isolated polynucleotides of the invention include a polynucleotide comprising the nucleotide sequences of SEQ ID NO: 1-216, or 433-648; a polynucleotide encoding any one of the peptide sequences of SEQ ID NO: 217-432, or 649-864; and a polynucleotide comprising the nucleotide sequence encoding the mature protein coding sequence of the polypeptides of any one of SEQ ID NO: 217-432, or 649-864. The polynucleotides of the present invention also include, but are not limited to, a polynucleotide that hybridizes under stringent conditions to (a) the complement of any of the nucleotides sequences of SEQ ID NO: 1-216, or 433-648; (b) nucleotide sequences encoding any one of the amino acid sequences set forth in the Sequence Listing as SEQ ID NO: 217-432, or 649-864; (c) a polynucleotide which is an allelic variant of any polynucleotide recited above; (d) a polynucleotide which encodes a species homolog of any of the proteins recited above; or (e) a polynucleotide that encodes a polypeptide comprising a specific domain or truncation of the polypeptides of SEQ ID NO: 217-432, or 649-864. Domains of interest may depend on the nature of the encoded polypeptide; e.g., domains in receptor-like polypeptides include ligand-binding, extracellular, transmembrane, or cytoplasmic domains, or combinations thereof; domains in immunoglobulin-like proteins include the variable immunoglobulin-like domains; domains in enzyme-like polypeptides include catalytic and substrate binding domains; and domains in ligand polypeptides include receptor-binding domains.

[0068] The polynucleotides of the invention include naturally occurring or wholly or partially synthetic DNA, e.g., cDNA and genomic DNA, and RNA, e.g., mRNA. The polynucleotides may include all of the coding region of the cDNA or may represent a portion of the coding region of the cDNA.

[0069] The present invention also provides genes corresponding to the cDNA sequences disclosed herein. The corresponding genes can be isolated in accordance with known methods using the sequence information disclosed herein. Such methods include the preparation of probes or primers from the disclosed sequence information for identification and/or amplification of genes in appropriate genomic libraries or other sources of genoric materials. Further 5′ and 3′ sequence can be obtained using methods known in the art. For example, full length cDNA or genomic DNA that corresponds to any of the polynucleotides of SEQ ID NO: 1-216, or 433-648 can be obtained by screening appropriate cDNA or genomic DNA libraries under suitable hybridization conditions using any of the polynucleotides of SEQ ID NO: 1-216, or 433-648 or a portion thereof as a probe. Alternatively, the polynucleotides of SEQ ID NO: 1-216, or 433-648 may be used as the basis for suitable primer(s) that allow identification and/or amplification of genes in appropriate genomic DNA or cDNA libraries.

[0070] The nucleic acid sequences of the invention can be assembled from ESTs and sequences (including cDNA and genomic sequences) obtained from one or more public databases, such as dbEST, gbpri, and UniGene. The EST sequences can provide identifying sequence information, representative fragment or segment information, or novel segment information for the full length gene.

[0071] The polynucleotides of the invention also provide polynucleotides including nucleotide sequences that are substantially equivalent to the polynucleotides recited above. Polynucleotides according to the invention can have, e.g., at least about 65%, at least about 70%, at least about 75%, at least about 80%, 81%, 82%, 83%, 84%, more typically at least about 85%, 86%, 87%, 88%, 89%, more typically at least about 90%, 91%, 92%, 93%, 94%, and even more typically at least about 95%, 96%, 97%, 98%, 99%, sequence identity to a polynucleotide recited above.

[0072] Included within the scope of the nucleic acid sequences of the invention are nucleic acid sequence fragments that hybridize under stringent conditions to any of the nucleotide sequences of SEQ ID NO: 1-216, or 433-648, or complements thereof, which fragment is greater than about 5 nucleotides, preferably 7 nucleotides, more preferably greater than 9 nucleotides and most preferably greater than 17 nucleotides. Fragments of, e.g. 15, 17, or 20 nucleotides or more that are selective for (i.e. specifically hybridize to) any one of the polynucleotides of the invention are contemplated. Probes capable of specifically hybridizing to a polynucleotide can differentiate polynucleotide sequences of the invention from other polynucleotide sequences in the same family of genes or can differentiate human genes from genes of other species, and are preferably based on unique nucleotide sequences.

[0073] The sequences falling within the scope of the present invention are not limited to these specific sequences, but also include allelic and species variations thereof. AUelic and species variations can be routinely determined by comparing the sequence provided in SEQ ID NO: 1-216, or 433-648, a representative fragment thereof, or a nucleotide sequence at least 90% identical, preferably 95% identical, to SEQ ID NO: 1-216, or 433-648 with a sequence from another isolate of the same species. Furthermore, to accommodate codon variability, the invention includes nucleic acid molecules coding for the same amino acid sequences as do the specific ORFs disclosed herein. In other words, in the coding region of an ORF, substitution of one codon for another codon that encodes the same amino acid is expressly contemplated.

[0074] The nearest neighbor or homology result for the nucleic acids of the present invention, including SEQ ID NO: 1-216, or 433-648, can be obtained by searching a database using an algorithm or a program. Preferably, a BLAST which stands for Basic Local Alignment Search Tool is used to search for local sequence alignments (Altshul, S. F. J Mol. Evol. 36 290-300 (1993) and Altschul S. F. et al. J. Mol. Biol. 21 :403-410 (1990)). Alternatively a FASTA version 3 search against Genpept, using Fastxy algorithm.

[0075] Species homologs (or orthologs) of the disclosed polynucleotides and proteins are also provided by the present invention. Species homologs may be isolated and identified by making suitable probes or primers from the sequences provided herein and screening a suitable nucleic acid source from the desired species.

[0076] The invention also encompasses allelic variants of the disclosed polynucleotides or proteins; that is, naturally-occurring alternative forms of the isolated polynucleotide which also encode proteins which are identical, homologous or related to that encoded by the polynucleotides.

[0077] The nucleic acid sequences of the invention are further directed to sequences which encode variants of the described nucleic acids. These amino acid sequence variants may be prepared by methods known in the art by introducing appropriate nucleotide changes into a native or variant polynucleotide. There are two variables in the construction of amino acid sequence variants: the location of the mutation and the nature of the mutation. Nucleic acids encoding the amino acid sequence variants are preferably constructed by mutating the polynucleotide to encode an amino acid sequence that does not occur in nature. These nucleic acid alterations can be made at sites that differ in the nucleic acids from different species (variable positions) or in highly conserved regions (constant regions). Sites at such locations will typically be modified in series, e.g., by substituting first with conservative choices (e.g., hydrophobic amino acid to a different hydrophobic amino acid) and then with more distant choices (e.g., hydrophobic amino acid to a charged amino acid), and then deletions or insertions may be made at the target site. Amino acid sequence deletions generally range from about 1 to 30 residues, preferably about 1 to 10 residues, and are typically contiguous. Amino acid insertions include amino- and/or carboxyl-terminal fusions ranging in length from one to one hundred or more residues, as well as intrasequence insertions of single or multiple amino acid residues. Intrasequence insertions may range generally from about 1 to 10 amino residues, preferably from 1 to 5 residues. Examples of terminal insertions include the heterologous signal sequences necessary for secretion or for intracellular targeting in different host cells and sequences such as FLAG or poly-histidine sequences useful for purifying the expressed protein.

[0078] In a preferred method, polynucleotides encoding the novel amino acid sequences are changed via site-directed mutagenesis. This method uses oligonucleotide sequences to alter a polynucleotide to encode the desired amino acid variant, as well as sufficient adjacent nucleotides on both sides of the changed amino acid to form a stable duplex on either side of the site of being changed. In general, the techniques of site-directed mutagenesis are well known to those of skill in the art and this technique is exemplified by publications such as, Edelman et al., DNA 2:183 (1983). A versatile and efficient method for producing site-specific changes in a polynucleotide sequence was published by Zoller and Smith, Nucleic Acids Res. 10:6487-6500 (1982). PCR may also be used to create amino acid sequence variants of the novel nucleic acids. When small amounts of template DNA are used as starting material, primer(s) that differs slightly in sequence from the corresponding region in the template DNA can generate the desired amino acid variant. PCR amplification results in a population of product DNA fragments that differ from the polynucleotide template encoding the polypeptide at the position specified by the primer. The product DNA fragments replace the corresponding region in the plasmid and this gives a polynucleotide encoding the desired amino acid variant.

[0079] A further technique for generating amino acid variants is the cassette mutagenesis technique described in Wells et al., Gene 34:315 (1985); and other mutagenesis techniques well known in the art, such as, for example, the techniques in Sambrook et al., supra, and Current Protocols in Molecular Biology, Ausubel et al. Due to the inherent degeneracy of the genetic code, other DNA sequences which encode substantially the same or a functionally equivalent amino acid sequence may be used in the practice of the invention for the cloning and expression of these novel nucleic acids. Such DNA sequences include those which are capable of hybridizing to the appropriate novel nucleic acid sequence under stringent conditions.

[0080] Polynucleotides encoding preferred polypeptide truncations of the invention can be used to generate polynucleotides encoding chimeric or fusion proteins comprising one or more domains of the invention and heterologous protein sequences.

[0081] The polynucleotides of the invention additionally include the complement of any of the polynucleotides recited above. The polynucleotide can be DNA (genomic, cDNA, amplified, or synthetic) or RNA. Methods and algorithms for obtaining such polynucleotides are well known to those of skill in the art and can include, for example, methods for determining hybridization conditions that can routinely isolate polynucleotides of the desired sequence identities.

[0082] In accordance with the invention, polynucleotide sequences comprising the mature protein coding sequences corresponding to any one of SEQ ID NO: 1-216, or 433-648, or functional equivalents thereof, may be used to generate recombinant DNA molecules that direct the expression of that nucleic acid, or a functional equivalent thereof, in appropriate host cells. Also included are the cDNA inserts of any of the clones identified herein.

[0083] A polynucleotide according to the invention can be joined to any of a variety of other nucleotide sequences by well-established recombinant DNA techniques (see Sambrook J et al. (1989) Molecular Cloning: A Laboratory Manual, Cold Spring Harbor Laboratory, NY). Useful nucleotide sequences for joining to polynucleotides include an assortment of vectors, e.g., plasmids, cosmids, lambda phage derivatives, phagemids, and the like, that are well known in the art. Accordingly, the invention also provides a vector including a polynucleotide of the invention and a host cell containing the polynucleotide. In general, the vector contains an origin of replication functional in at least one organism, convenient restriction endonuclease sites, and a selectable marker for the host cell. Vectors according to the invention include expression vectors, replication vectors, probe generation vectors, and sequencing vectors. A host cell according to the invention can be a prokaryotic or eukaryotic cell and can be a unicellular organism or part of a multicellular organism.

[0084] The present invention further provides recombinant constructs comprising a nucleic acid having any of the nucleotide sequences of SEQ ID NO: 1-216, or 433-648 or a fragment thereof or any other polynucleotides of the invention. In one embodiment, the recombinant constructs of the present invention comprise a vector, such as a plasmid or viral vector, into which a nucleic acid having any of the nucleotide sequences of SEQ ID NO: 1-216, or 433-648 or a fragment thereof is inserted, in a forward or reverse orientation. In the case of a vector comprising one of the ORFs of the present invention, the vector may further comprise regulatory sequences, including for example, a promoter, operably linked to the ORF. Large numbers of suitable vectors and promoters are known to those of skill in the art and are commercially available for generating the recombinant constructs of the present invention. The following vectors are provided by way of example. Bacterial: pBs, phagescript, PsiX174, pBluescript SK, pBs KS, pNH8a, pNH16a, pNH18a, pNH46a (Stratagene); pTrc99A, pKK223-3, pKK233-3, pDR540, pRIT5 (Pharmacia). Eukaryotic: pWLneo, pSV2cat, pOG44, PXTI, pSG (Stratagene) pSVK3, pBPV, pMSG, pSVL (Pharmacia).

[0085] The isolated polynucleotide of the invention may be operably linked to an expression control sequence such as the pMT2 or pED expression vectors disclosed in Kaufman et al., Nucleic Acids Res. 19, 4485-4490 (1991), in order to produce the protein recombinantly. Many suitable expression control sequences are known in the art. General methods of expressing recombinant proteins are also known and are exemplified in R. Kaufman, Methods in Enzymology 185, 537-566 (1990). As defined herein “operably linked” means that the isolated polynucleotide of the invention and an expression control sequence are situated within a vector or cell in such a way that the protein is expressed by a host cell which has been transformed (transfected) with the ligated polynucleotide/expression control sequence.

[0086] Promoter regions can be selected from any desired gene using CAT (chloramphenicol transferase) vectors or other vectors with selectable markers. Two appropriate vectors are pKK232-8 and pCM7. Particular named bacterial promoters include lacI, lacZ, T3, T7, gpt, lambda PR, and trc. Eukaryotic promoters include CMV immediate early, HSV thymidine kinase, early and late SV40, LTRs from retrovirus, and mouse metallothionein-I. Selection of the appropriate vector and promoter is well within the level of ordinary skill in the art. Generally, recombinant expression vectors will include origins of replication and selectable markers permitting transformation of the host cell, e.g., the ampicillin resistance gene of E. coli and S. cerevisiae TRP1 gene, and a promoter derived from a highly-expressed gene to direct transcription of a downstream structural sequence. Such promoters can be derived from operons encoding glycolytic enzymes such as 3-phosphoglycerate kinase (PGK), a-factor, acid phosphatase, or heat shock proteins, among others. The heterologous structural sequence is assembled in appropriate phase with translation initiation and termination sequences, and preferably, a leader sequence capable of directing secretion of translated protein into the periplasmic space or extracellular medium. Optionally, the heterologous sequence can encode a fusion protein including an amino terminal identification peptide imparting desired characteristics, e.g., stabilization or simplified purification of expressed recombinant product. Useful expression vectors for bacterial use are constructed by inserting a structural DNA sequence encoding a desired protein together with suitable translation initiation and termination signals in operable reading phase with a functional promoter. The vector will comprise one or more phenotypic selectable markers and an origin of replication to ensure maintenance of the vector and to, if desirable, provide amplification within the host. Suitable prokaryotic hosts for transformation include E. coli, Bacillus subtilis, Salmonella typhimurium and various species within the genera Pseudomonas, Streptomyces, and Staphylococcus, although others may also be employed as a matter of choice.

[0087] As a representative but non-limiting example, useful expression vectors for bacterial use can comprise a selectable marker and bacterial origin of replication derived from commercially available plasmids comprising genetic elements of the well known cloning vector pBR322 (ATCC 37017). Such commercial vectors include, for example, pKK223-3 (Pharmacia Fine Chemicals, Uppsala, Sweden) and GEM 1 (Promega Biotech, Madison, Wis., USA). These pBR322 “backbone” sections are combined with an appropriate promoter and the structural sequence to be expressed. Following transformation of a suitable host strain and growth of the host strain to an appropriate cell density, the selected promoter is induced or derepressed by appropriate means (e.g., temperature shift or chemical induction) and cells are cultured for an additional period. Cells are typically harvested by centrifugation, disrupted by physical or chemical means, and the resulting crude extract retained for further purification.

[0088] Polynucleotides of the invention can also be used to induce immune responses. For example, as described in Fan et al., Nat. Biotech. 17:870-872 (1999), incorporated herein by reference, nucleic acid sequences encoding a polypeptide may be used to generate antibodies against the encoded polypeptide following topical administration of naked plasmid DNA or following injection, and preferably intramuscular injection of the DNA. The nucleic acid sequences are preferably inserted in a recombinant expression vector and may be in the form of naked DNA.

### 4.3 Antisense Nucleic Acids

[0089] Another aspect of the invention pertains to isolated antisense nucleic acid molecules that are hybridizable to or complementary to the nucleic acid molecule comprising the nucleotide sequence of SEQ ID NO: 1-216, or 433-648, or fragments, analogs or derivatives thereof. An “antisense” nucleic acid comprises a nucleotide sequence that is complementary to a “sense” nucleic acid encoding a protein, e.g., complementary to the coding strand of a double-stranded cDNA molecule or complementary to an mRNA sequence. In specific aspects, antisense nucleic acid molecules are provided that comprise a sequence complementary to at least about 10, 25, 50, 100, 250 or 500 nucleotides or an entire coding strand, or to only a portion thereof. Nucleic acid molecules encoding fragments, homologs, derivatives and analogs of a protein of any of SEQ ID NO: 217-432, or 649-864 or antisense nucleic acids complementary to a nucleic acid sequence of SEQ ID NO: 1-216, or 433-648 are additionally provided.

[0090] In one embodiment, an antisense nucleic acid molecule is antisense to a “coding region” of the coding strand of a nucleotide sequence of the invention. The term “coding region” refers to the region of the nucleotide sequence comprising codons which are translated into amino acid residues. In another embodiment, the antisense nucleic acid molecule is antisense to a “noncoding region” of the coding strand of a nucleotide sequence of the invention. The term “noncoding region” refers to 5′ and 3′ sequences which flank the coding region that are not translated into amino acids (i.e., also referred to as 5′ and 3′ untranslated regions).

[0091] Given the coding strand sequences encoding a nucleic acid disclosed herein (e.g., SEQ ID NO: 1-216, or 433-648), antisense nucleic acids of the invention can be designed according to the rules of Watson and Crick or Hoogsteen base pairing. The antisense nucleic acid molecule can be complementary to the entire coding region of an mRNA, but more preferably is an oligonucleotide that is antisense to only a portion of the coding or noncoding region of a mRNA. For example, the antisense oligonucleotide can be complementary to the region surrounding the translation start site of a mRNA. An antisense oligonucleotide can be, for example, about 5, 10, 15, 20, 25, 30, 35, 40, 45 or 50 nucleotides in length. An antisense nucleic acid of the invention can be constructed using chemical synthesis or enzymatic ligation reactions using procedures known in the art. For example, an antisense nucleic acid (e.g., an antisense oligonucleotide) can be chemically synthesized using naturally occurring nucleotides or variously modified nucleotides designed to increase the biological stability of the molecules or to increase the physical stability of the duplex formed between the antisense and sense nucleic acids, e.g., phosphorothioate derivatives and acridine substituted nucleotides can be used.

[0092] Examples of modified nucleotides that can be used to generate the antisense nucleic acid include: 5-fluorouracil, 5-bromouracil, 5-chlorouracil, 5-iodouracil, hypoxanthine, xanthine, 4-acetylcytosine, 5-(carboxyhydroxylmethyl) uracil, 5-carboxymethylaminomethyl-2-thiouridine, 5-carboxymethylaminomethyluracil, dihydrouracil, beta-D-galactosylqueosine, inosine, N6-isopentenyladenine, 1-methylguanine, 1-methylinosine, 2,2-dimethylguanine, 2-methyladenine, 2-methylguanine, 3-methylcytosine, 5-methylcytosine, N6-adenine, 7-methylguanine, 5-methylaminomethyluracil, 5-methoxyaminomethyl-2-thiouracil, beta-D-mannosylqueosine, 5′-methokycarboxymethyluracil, 5-methoxyuracil, 2-methylthio-N6-isopentenyladenine, uracil-5-oxyacetic acid (v), wybutoxosine, pseudouracil, queosine, 2-thiocytosine, 5-methyl-2-thiouracil, 2-thiouracil, 4thiouracil, 5-methyluracil, uracil-5-oxyacetic acid methylester, uracil-5-oxyacetic acid (v), 5-methyl-2-thiouracil, 3-(3-amino-3-N-2-carboxypropyl) uracil, (acp3)w, and 2,6-diaminopurine. Alternatively, the antisense nucleic acid can be produced biologically using an expression vector into which a nucleic acid has been subcloned in an antisense orientation (i.e., RNA transcribed from the inserted nucleic acid will be of an antisense orientation to a target nucleic acid of interest, described further in the following subsection).

[0093] The antisense nucleic acid molecules of the invention are typically administered to a subject or generated in situ such that they hybridize with or bind to cellular mRNA and/or genomic DNA encoding a protein according to the invention to thereby inhibit expression of the protein, e.g., by inhibiting transcription and/or translation. The hybridization can be by conventional nucleotide complementarity to form a stable duplex, or, for example, in the case of an antisense nucleic acid molecule that binds to DNA duplexes, through specific interactions in the major groove of the double helix. An example of a route of administration of antisense nucleic acid molecules of the invention includes direct injection at a tissue site. Alternatively, antisense nucleic acid molecules can be modified to target selected cells and then administered systemically. For example, for systemic administration, antisense molecules can be modified such that they specifically bind to receptors or antigens expressed on a selected cell surface, e.g., by linking the antisense nucleic acid molecules to peptides or antibodies that bind to cell surface receptors or antigens. The antisense nucleic acid molecules can also be delivered to cells using the vectors described herein. To achieve sufficient intracellular concentrations of antisense molecules, vector constructs in which the antisense nucleic acid molecule is placed under the control of a strong pol II or pol III promoter are preferred.

[0094] In yet another embodiment, the antisense nucleic acid molecule of the invention is an α-anomeric nucleic acid molecule. An α-anomeric nucleic acid molecule forms specific double-stranded hybrids with complementary RNA in which, contrary to the usual β-units, the strands run parallel to each other (Gaultier et al. (1987) Nucleic Acids Res 15: 6625-6641). The antisense nucleic acid molecule can also comprise a 2′-o-methylribonucleotide (Inoue et al. (1987) Nucleic Acids Res 15: 6131-6148) or a chimeric RNA -DNA analogue (Inoue et al. (1987) FEBS Lett 215: 327-330).

### 4.4 Ribozymes and PNA Moieties

[0095] In still another embodiment, an antisense nucleic acid of the invention is a ribozyme. Ribozymes are catalytic RNA molecules with ribonuclease activity that are capable of cleaving a single-stranded nucleic acid, such as an mRNA, to which they have a complementary region. Thus, ribozymes (e.g., hammerhead ribozymes (described in Haselhoff and Gerlach (1988) Nature 334:585-591)) can be used to catalytically cleave a mRNA transcripts to thereby inhibit translation of a mRNA. A ribozyme having specificity for a nucleic acid of the invention can be designed based upon the nucleotide sequence of a DNA disclosed herein (i.e., SEQ ID NO: 1-216, or 433-648). For example, a derivative of a Tetrahymena L-19 IVS RNA can be constructed in which the nucleotide sequence of the active site is complementary to the nucleotide sequence to be cleaved in an mRNA of SEQ ID NO: 1-216, or 433-648 (see, e.g., Cech et al. U.S. Pat. No. 4,987,071; and Cech et al. U.S. Pat. No. 5,116,742). Alternatively, polynucleotides of the invention can be used to select a catalytic RNA having a specific ribonuclease activity from a pool of RNA molecules. See, e.g., Bartel et al., (1993) Science 261:1411-1418.

[0096] Alternatively, gene expression can be inhibited by targeting nucleotide sequences complementary to the regulatory region (e.g., promoter and/or enhancers) to form triple helical structures that prevent transcription of the gene in target cells. See generally, Helene. (1991) Anticancer Drug Des. 6: 569-84; Helene. et al. (1992) Ann. N.Y. Acad. Sci. 660:27-36; and Maher (1992) Bioassays 14: 807-15.

[0097] In various embodiments, the nucleic acids of the invention can be modified at the base moiety, sugar moiety or phosphate backbone to improve, e.g., the stability, hybridization, or solubility of the molecule. For example, the deoxyribose phosphate backbone of the nucleic acids can be modified to generate peptide nucleic acids (see Hyrup et al. (1996) Bioorg Med Chem 4: 5-23). As used herein, the terms “peptide nucleic acids” or “PNAs” refer to nucleic acid mimics, e.g., DNA mimics, in which the deoxyribose phosphate backbone is replaced by a pseudopeptide backbone and only the four natural nucleobases are retained. The neutral backbone of PNAs has been shown to allow for specific hybridization to DNA and RNA under conditions of low ionic strength. The synthesis of PNA oligomers can be performed using standard solid phase peptide synthesis protocols as described in Hyrup et al. (1996) above; Perry-O'Keefe et al. (1996) PNAS 93: 14670-675.

[0098] PNAs of the invention can be used in therapeutic and diagnostic applications. For example, PNAs can be used as antisense or antigene agents for sequence-specific modulation of gene expression by, e.g., inducing transcription or translation arrest or inhibiting replication. PNAs of the invention can also be used, e.g., in the analysis of single base pair mutations in a gene by, e.g., PNA directed PCR clamping; as artificial restriction enzymes when used in combination with other enzymes, e.g, S1 nucleases (Hyrup B. (1996) above); or as probes or primers for DNA sequence and hybridization (Hyrup et al. (1996), above; Perry-O'Keefe (1996), above).

[0099] In another embodiment, PNAs of the invention can be modified, e.g., to enhance their stability or cellular uptake, by attaching lipophilic or other helper groups to PNA, by the formation of PNA-DNA chimeras, or by the use of liposomes or other techniques of drug delivery known in the art. For example, PNA-DNA chimeras can be generated that may combine the advantageous properties of PNA and DNA. Such chimeras allow DNA recognition enzymes, e.g., RNase H and DNA polymerases, to interact with the DNA portion while the PNA portion would provide high binding affinity and specificity. PNA-DNA chimeras can be linked using linkers of appropriate lengths selected in terms of base stacking, number of bonds between the nucleobases, and orientation (Hyrup (1996) above). The synthesis of PNA-DNA chimeras can be performed as described in Hyrup (1996) above and Finn et al. (1996) Nucl Acids Res 24: 3357-63. For example, a DNA chain can be synthesized on a solid support using standard phosphoramidite coupling chemistry, and modified nucleoside analogs, e.g., 5′-(4methoxytrityl)amino-5′-deoxy-thymidine phosphoramidite, can be used between the PNA and the 5′ end of DNA (Mag et al. (1989) Nucl Acid Res 17: 5973-88). PNA monomers are then coupled in a stepwise manner to produce a chimeric molecule with a 5′ PNA segment and a 3′ DNA segment (Finn et al. (1996) above). Alternatively, chimeric molecules can be synthesized with a 5′ DNA segment and a 3′ PNA segment. See, Petersen et al. (1975) Bioorg Med Chem Lett 5: 1119-11124.

[0100] In other embodiments, the oligonucleotide may include other appended groups such as peptides (e.g., for targeting host cell receptors in vivo), or agents facilitating transport across the cell membrane (see, e.g., Letsinger et al., 1989, Proc. Natl. Acad. Sci. U.S.A. 86:6553-6556; Lemaitre et al., 1987, Proc. Natl. Acad. Sci. 84:648-652; PCT Publication No. WO88/09810) or the blood-brain barrier (see, e.g., PCT Publication No. WO89/10134). In addition, oligonucleotides can be modified with hybridization triggered cleavage agents (See, e.g., Krol et al., 1988, BioTechniques 6:958-976) or intercalating agents. (See, e.g., Zon, 1988, Pharm. Res. 5: 539-549). To this end, the oligonucleotide may be conjugated to another molecule, e.g., a peptide, a hybridization triggered cross-linking agent, a transport agent, a hybridization-triggered cleavage agent, etc.

### 4.5 Hosts

[0101] The present invention further provides host cells genetically engineered to contain the polynucleotides of the invention. For example, such host cells may contain nucleic acids of the invention introduced into the host cell using known transformation, transfection or infection methods. The present invention still further provides host cells genetically engineered to express the polynucleotides of the invention, wherein such polynucleotides are in operative association with a regulatory sequence heterologous to the host cell which drives expression of the polynucleotides in the cell.

[0102] Knowledge of nucleic acid sequences allows for modification of cells to permit, or increase, expression of endogenous polypeptide. Cells can be modified (e.g., by homologous recombination) to provide increased polypeptide expression by replacing, in whole or in part, the naturally occurring promoter with all or part of a heterologous promoter so that the cells express the polypeptide at higher levels. The heterologous promoter is inserted in such a manner that it is operatively linked to the encoding sequences. See, for example, PCT International Publication No. WO94/12650, PCT International Publication No. WO92/20808, and PCT International Publication No. WO91/09955. It is also contemplated that, in addition to heterologous promoter DNA, amplifiable marker DNA (e.g., ada, dhfr, and the multifunctional CAD gene which encodes carbamyl phosphate synthase, aspartate transcarbamylase, and dihydroorotase) and/or intron DNA may be inserted along with the heterologous promoter DNA. If linked to the coding sequence, amplification of the marker DNA by standard selection methods results in co-amplification of the desired protein coding sequences in the cells.

[0103] The host cell can be a higher eukaryotic host cell, such as a mammalian cell, a lower eukaryotic host cell, such as a yeast cell, or the host cell can be a prokaryotic cell, such as a bacterial cell. Introduction of the recombinant construct into the host cell can be effected by calcium phosphate transfection, DEAE-dextran mediated transfection, or electroporation (Davis, L. et al., Basic Methods in Molecular Biology (1986)). The host cells containing one of the polynucleotides of the invention, can be used in conventional manners to produce the gene product encoded by the isolated fragment (in the case of an ORF) or can be used to produce a heterologous protein under the control of the EMF.

[0104] Any host/vector system can be used to express one or more of the ORFs of the present invention. These include, but are not limited to, eukaryotic hosts such as HeLa cells, Cv-1 cell, COS cells, 293 cells, and Sf9 cells, as well as prokaryotic host such as E. coli and B. subtilis. The most preferred cells are those which do not normally express the particular polypeptide or protein or which expresses the polypeptide or protein at low natural level. Mature proteins can be expressed in mammalian cells, yeast, bacteria, or other cells under the control of appropriate promoters. Cell-free translation systems can also be employed to produce such proteins using RNAs derived from the DNA constructs of the present invention. Appropriate cloning and expression vectors for use with prokaryotic and eukaryotic hosts are described by Sambrook, et al., in Molecular Cloning: A Laboratory Manual, Second Edition, Cold Spring Harbor, N.Y. (1989), the disclosure of which is hereby incorporated by reference.

[0105] Various mammalian cell culture systems can also be employed to express recombinant protein. Examples of mammalian expression systems include the COS-7 lines of monkey kidney fibroblasts, described by Gluzman, Cell 23:175 (1981). Other cell lines capable of expressing a compatible vector are, for example, the C127, monkey COS cells, Chinese Hamster Ovary (CHO) cells, human kidney 293 cells, human epidermal A431 cells, human Colo205 cells, 3T3 cells, CV-1 cells, other transformed primate cell lines, normal diploid cells, cell strains derived from in vitro culture of primary tissue, primary explants, HeLa cells, mouse L cells, BHK, HL-60, U937, HaK or Jurkat cells. Mammalian expression vectors will comprise an origin of replication, a suitable promoter and also any necessary ribosome binding sites, polyadenylation site, splice donor and acceptor sites, transcriptional termination sequences, and 5′ flanking nontranscribed sequences. DNA sequences derived from the SV40 viral genome, for example, SV40 origin, early promoter, enhancer, splice, and polyadenylation sites may be used to provide the required nontranscribed genetic elements. Recombinant polypeptides and proteins produced in bacterial culture are usually isolated by initial extraction from cell pellets, followed by one or more salting-out, aqueous ion exchange or size exclusion chromatography steps. Protein refolding steps can be used, as necessary, in completing configuration of the mature protein. Finally, high performance liquid chromatography (HPLC) can be employed for final purification steps. Microbial cells employed in expression of proteins can be disrupted by any convenient method, including freeze-thaw cycling, sonication, mechanical disruption, or use of cell lysing agents.

[0106] Alternatively, it may be possible to produce the protein in lower eukaryotes such as yeast or insects or in prokaryotes such as bacteria Potentially suitable yeast strains include Saccharomyces cerevisiae, Schizosaccharomyces pombe, Kluyveromyces strains, Candida, or any yeast strain capable of expressing heterologous proteins. Potentially suitable bacterial strains include Escherichia coli, Bacillus subtilis, Salmonella typhimurium, or any bacterial strain capable of expressing heterologous proteins. If the protein is made in yeast or bacteria, it may be necessary to modify the protein produced therein, for example by phosphorylation or glycosylation of the appropriate sites, in order to obtain the functional protein. Such covalent attachments may be accomplished using known chemical or enzymatic methods.

[0107] In another embodiment of the present invention, cells and tissues may be engineered to express an endogenous gene comprising the polynucleotides of the invention under the control of inducible regulatory elements, in which case the regulatory sequences of the endogenous gene may be replaced by homologous recombination. As described herein, gene targeting can be used to replace a gene's existing regulatory region with a regulatory sequence isolated from a different gene or a novel regulatory sequence synthesized by genetic engineering methods. Such regulatory sequences may be comprised of promoters, enhancers, scaffold-attachment regions, negative regulatory elements, transcriptional initiation sites, regulatory protein binding sites or combinations of said sequences. Alternatively, sequences which affect the structure or stability of the RNA or protein produced may be replaced, removed, added, or otherwise modified by targeting. These sequence include polyadenylation signals, mRNA stability elements, splice sites, leader sequences for enhancing or modifying transport or secretion properties of the protein, or other sequences which alter or improve the function or stability of protein or RNA molecules.

[0108] The targeting event may be a simple insertion of the regulatory sequence, placing the gene under the control of the new regulatory sequence, e.g., inserting a new promoter or enhancer or both upstream of a gene. Alternatively, the targeting event may be a simple deletion of a regulatory element, such as the deletion of a tissue-specific negative regulatory element. Alternatively, the targeting event may replace an existing element; for example, a tissue-specific enhancer can be replaced by an enhancer that has broader or different cell-type specificity than the naturally occurring elements. Here, the naturally occurring sequences are deleted and new sequences are added. In all cases, the identification of the targeting event may be facilitated by the use of one or more selectable marker genes that are contiguous with the targeting DNA, allowing for the selection of cells in which the exogenous DNA has integrated into the host cell genome. The identification of the targeting event may also be facilitated by the use of one or more marker genes exhibiting the property of negative selection, such that the negatively selectable marker is linked to the exogenous DNA, but configured such that the negatively selectable marker flanks the targeting sequence, and such that a correct homologous recombination event with sequences in the host cell genome does not result in the stable integration of the negatively selectable marker. Markers useful for this purpose include the Herpes Simplex Virus thymidine kinase (TK) gene or the bacterial xanthine-guanine phosphoribosyl-transferase (gpt) gene.

[0109] The gene targeting or gene activation techniques which can be used in accordance with this aspect of the invention are more particularly described in U.S. Pat. No. 5,272,071 to Chappel; U.S. Pat. No. 5,578,461 to Sherwin et al.; International Application No. PCT/US92/09627 (WO93/09222) by Selden et al.; and International Application No. PCT/US90/06436 (WO91/06667) by Skoultchi et al., each of which is incorporated by reference herein in its entirety.

### 4.6 Polypeptides of the Invention

[0110] The isolated polypeptides of the invention include, but are not limited to, a polypeptide comprising: the amino acid sequences set forth as any one of SEQ ID NO: 217-432, or 649-864 or an amino acid sequence encoded by any one of the nucleotide sequences SEQ ID NO: 1-216, or 433-648 or the corresponding full length or mature protein. Polypeptides of the invention also include polypeptides preferably with biological or immunological activity that are encoded by: (a) a polynucleotide having any one of the nucleotide sequences set forth in SEQ ID NO: 1-216, or 433-648 or (b) polynucleotides encoding any one of the amino acid sequences set forth as SEQ ID NO: 217-432, or 649-864 or (c) polynucleotides that hybridize to the complement of the polynucleotides of either (a) or (b) under stringent hybridization conditions. The invention also provides biologically active or immunologically active variants of any of the amino acid sequences set forth as SEQ ID NO: 217-432, or 649-864 or the corresponding full length or mature protein; and “substantial equivalents” thereof (e.g., with at least about 65%, at least about 70%, at least about 75%, at least about 80%, at least about 85%, 86%, 87%, 88%, 89%, at least about 90%, 91%, 92%, 93%, 94%, typically at least about 95%, 96%, 97%, more typically at least about 98%, or most typically at least about 99% amino acid identity) that retain biological activity. Polypeptides encoded by allelic variants may have a similar, increased, or decreased activity compared to polypeptides comprising SEQ ID NO: 217-432, or 649-864.

[0111] Fragments of the proteins of the present invention which are capable of exhibiting biological activity are also encompassed by the present invention. Fragments of the protein may be in linear form or they may be cyclized using known methods, for example, as described in H. U. Saragovi, et al., Bio/Technology 10, 773-778 (1992) and in R. S. McDowell, et al., J. Amer. Chem. Soc. 114, 9245-9253 (1992), both of which are incorporated herein by reference. Such fragments may be fused to carrier molecules such as immunoglobulins for many purposes, including increasing the valency of protein binding sites.

[0112] The present invention also provides both full-length and mature forms (for example, without a signal sequence or precursor sequence) of the disclosed proteins. The protein coding sequence is identified in the sequence listing by translation of the disclosed nucleotide sequences. The mature form of such protein may be obtained by expression of a full-length polynucleotide in a suitable mammalian cell or other host cell. The sequence of the mature form of the protein is also determinable from the amino acid sequence of the full-length form. Where proteins of the present invention are membrane bound, soluble forms of the proteins are also provided. In such forms, part or all of the regions causing the proteins to be membrane bound are deleted so that the proteins are fully secreted from the cell in which they are expressed.

[0113] Protein compositions of the present invention may further comprise an acceptable carrier, such as a hydrophilic, e.g., pharmaceutically acceptable, carrier.

[0114] The present invention further provides isolated polypeptides encoded by the nucleic acid fragments of the present invention or by degenerate variants of the nucleic acid fragments of the present invention. By “degenerate variant” is intended nucleotide fragments which differ from a nucleic acid fragment of the present invention (e.g., an ORF) by nucleotide sequence but, due to the degeneracy of the genetic code, encode an identical polypeptide sequence. Preferred nucleic acid fragments of the present invention are the ORFs that encode proteins.

[0115] A variety of methodologies known in the art can be utilized to obtain any one of the isolated polypeptides or proteins of the present invention. At the simplest level, the amino acid sequence can be synthesized using commercially available peptide synthesizers. The synthetically-constructed protein sequences, by virtue of sharing primary, secondary or tertiary structural and/or conformational characteristics with proteins may possess biological properties in common therewith, including protein activity. This technique is particularly useful in producing small peptides and fragments of larger polypeptides. Fragments are useful, for example, in generating antibodies against the native polypeptide. Thus, they may be employed as biologically active or immunological substitutes for natural, purified proteins in screening of therapeutic compounds and in immunological processes for the development of antibodies.

[0116] The polypeptides and proteins of the present invention can alternatively be purified from cells which have been altered to express the desired polypeptide or protein. As used herein, a cell is said to be altered to express a desired polypeptide or protein when the cell, through genetic manipulation, is made to produce a polypeptide or protein which it normally does not produce or which the cell normally produces at a lower level. One skilled in the art can readily adapt procedures for introducing and expressing either recombinant or synthetic sequences into eukaryotic or prokaryotic cells in order to generate a cell which produces one of the polypeptides or proteins of the present invention.

[0117] The invention also relates to methods for producing a polypeptide comprising growing a culture of host cells of the invention in a suitable culture medium, and purifying the protein from the cells or the culture in which the cells are grown. For example, the methods of the invention include a process for producing a polypeptide in which a host cell containing a suitable expression vector that includes a polynucleotide of the invention is cultured under conditions that allow expression of the encoded polypeptide. The polypeptide can be recovered from the culture, conveniently from the culture medium, or from a lysate prepared from the host cells and further purified. Preferred embodiments include those in which the protein produced by such process is a full length or mature form of the protein.

[0118] In an alternative method, the polypeptide or protein is purified from bacterial cells which naturally produce the polypeptide or protein. One skilled in the art can readily follow known methods for isolating polypeptides and proteins in order to obtain one of the isolated polypeptides or proteins of the present invention. These include, but are not limited to, immunochromatography, HPLC, size-exclusion chromatography, ion-exchange chromatography, and immuno-affinity chromatography. See, e.g., Scopes, Protein Purification: Principles and Practice, Springer-Verlag (1994); Sambrook, et al., in Molecular Cloning: A Laboratory Manual; Ausubel et al., Current Protocols in Molecular Biology. Polypeptide fragments that retain biological/immunological activity include fragments comprising greater than about 100 amino acids, or greater than about 200 amino acids, and fragments that encode specific protein domains.

[0119] The purified polypeptides can be used in in vitro binding assays which are well known in the art to identify molecules which bind to the polypeptides. These molecules include but are not limited to, for e.g., small molecules, molecules from combinatorial libraries, antibodies or other proteins. The molecules identified in the binding assay are then tested for antagonist or agonist activity in in vivo tissue culture or animal models that are well known in the art. In brief, the molecules are titrated into a plurality of cell cultures or animals and then tested for either cell/animal death or prolonged survival of the animal/cells.

[0120] In addition, the peptides of the invention or molecules capable of binding to the peptides may be complexed with toxins, e.g., ricin or cholera, or with other compounds that are toxic to cells. The toxin-binding molecule complex is then targeted to a tumor or other cell by the specificity of the binding molecule for SEQ ID NO: 217-432, or 649-864.

[0121] The protein of the invention may also be expressed as a product of transgenic animals, e.g., as a component of the milk of transgenic cows, goats, pigs, or sheep which are characterized by somatic or germ cells containing a nucleotide sequence encoding the protein.

[0122] The proteins provided herein also include proteins characterized by amino acid sequences similar to those of purified proteins but into which modification are naturally provided or deliberately engineered. For example, modifications, in the peptide or DNA sequence, can be made by those skilled in the art using known techniques. Modifications of interest in the protein sequences may include the alteration, substitution, replacement, insertion or deletion of a selected amino acid residue in the coding sequence. For example, one or more of the cysteine residues may be deleted or replaced with another amino acid to alter the conformation of the molecule. Techniques for such alteration, substitution, replacement, insertion or deletion are well known to those skilled in the art (see, e.g., U.S. Pat. No. 4,518,584). Preferably, such alteration, substitution, replacement, insertion or deletion retains the desired activity of the protein. Regions of the protein that are important for the protein function can be determined by various methods known in the art including the alanine-scanning method which involved systematic substitution of single or strings of amino acids with alanine, followed by testing the resulting alanine-containing variant for biological activity. This type of analysis determines the importance of the substituted amino acid(s) in biological activity. Regions of the protein that are important for protein function may be determined by the eMATRIX program.

[0123] Other fragments and derivatives of the sequences of proteins which would be expected to retain protein activity in whole or in part and are useful for screening or other immunological methodologies may also be easily made by those skilled in the art given the disclosures herein. Such modifications are encompassed by the present invention.

[0124] The protein may also be produced by operably linking the isolated polynucleotide of the invention to suitable control sequences in one or more insect expression vectors, and employing an insect expression system. Materials and methods for baculovirus/insect cell expression systems are commercially available in kit form from, e.g., Invitrogen, San Diego, Calif., U.S.A. (the MaxBat™ kit), and such methods are well known in the art, as described in Summers and Smith, Texas Agricultural Experiment Station Bulletin No. 1555 (1987), incorporated herein by reference. As used herein, an insect cell capable of expressing a polynucleotide of the present invention is “transformed.”

[0125] The protein of the invention may be prepared by culturing transformed host cells under culture conditions suitable to express the recombinant protein. The resulting expressed protein may then be purified from such culture (i.e., from culture medium or cell extracts) using known purification processes, such as gel filtration and ion exchange chromatography. The purification of the protein may also include an affinity column containing agents which will bind to the protein; one or more column steps over such affinity resins as concanavalin A-agarose, heparin-toyopearl™ or Cibacrom blue 3GA Sepharose™; one or more steps involving hydrophobic interaction chromatography using such resins as phenyl ether, butyl ether, or propyl ether; or immunoaffinity chromatography.

[0126] Alternatively, the protein of the invention may also be expressed in a form which will facilitate purification. For example, it may be expressed as a fusion protein, such as those of maltose binding protein (MBP), glutathione-S-transferase (GST) or thioredoxin (TRX), or as a His tag. Kits for expression and purification of such fusion proteins are commercially available from New England BioLab (Beverly, Mass.), Pharmacia (Piscataway, N.J.) and Invitrogen, respectively. The protein can also be tagged with an epitope and subsequently purified by using a specific antibody directed to such epitope. One such epitope (“FLAG®”) is commercially available from Kodak (New Haven, Conn.).

[0127] Finally, one or more reverse-phase high performance liquid chromatography (RP-HPLC) steps employing hydrophobic RP-HPLC media, e.g., silica gel having pendant methyl or other aliphatic groups, can be employed to further purify the protein. Some or all of the foregoing purification steps, in various combinations, can also be employed to provide a substantially homogeneous isolated recombinant protein. The protein thus purified is substantially free of other mammalian proteins and is defined in accordance with the present invention as an “isolated protein.”

[0128] The polypeptides of the invention include analogs (variants). This embraces fragments, as well as peptides in which one or more amino acids has been deleted, inserted, or substituted. Also, analogs of the polypeptides of the invention embrace fusions of the polypeptides or modifications of the polypeptides of the invention, wherein the polypeptide or analog is fused to another moiety or moieties, e.g., targeting moiety or another therapeutic agent. Such analogs may exhibit improved properties such as activity and/or stability. Examples of moieties which may be fused to the polypeptide or an analog include, for example, targeting moieties which provide for the delivery of polypeptide to pancreatic cells, e.g., antibodies to pancreatic cells, antibodies to immune cells such as T-cells, monocytes, dendritic cells, granulocytes, etc., as well as receptor and ligands expressed on pancreatic or immune cells. Other moieties which may be fused to the polypeptide include therapeutic agents which are used for treatment, for example, immunosuppressive drugs such as cyclosporin, SK506, azathioprine, CD3 antibodies and steroids. Also, polypeptides may be fused to immune modulators, and other cytokines such as alpha or beta interferon.

### 4.6.1 Determining Polypeptide and Polynucleotide Identity and Similarity

[0129] Preferred identity and/or similarity are designed to give the largest match between the sequences tested. Methods to determine identity and similarity are codified in computer programs including, but are not limited to, the GCG program package, including GAP (Devereux, J., et al., Nucleic Acids Research 12(1):387 (1984); Genetics Computer Group, University of Wisconsin, Madison, Wis.), BLASTP, BLASTN, BLASTX, FASTA (Altschul, S. F. et al., J. Molec. Biol. 215:403-410 (1990), PSI-BLAST (Altschul S. F. et al., Nucleic Acids Res. vol. 25, pp. 3389-3402, herein incorporated by reference), eMatrix software (Wu et al., J. Comp. Biol., Vol. 6, pp. 219-235 (1999), herein incorporated by reference), eMotif software (Nevill-Manning et al, ISMB-97, Vol. 4, pp. 202-209, herein incorporated by reference), pFam software (Sonnhammer et al., Nucleic Acids Res., Vol. 26(1), pp. 320-322 (1998), herein incorporated by reference) and the Kyte-Doolittle hydrophobocity prediction algorithm (J. Mol Biol, 157, pp. 105-31 (1982), incorporated herein by reference). The BLAST programs are publicly available from the National Center for Biotechnology Information (NCBI) and other sources (BLAST Manual, Altschul, S., et al. NCB NLM NIH Bethesda, Md. 20894; Altschul, S., et al., J. Mol. Biol. 215:403-410 (1990).

### 4.7 Chimeric and Fusion Proteins

[0130] The invention also provides chimeric or fusion proteins. As used herein, a “chimeric protein” or “fusion protein” comprises a polypeptide of the invention operatively linked to another polypeptide. Within a fusion protein the polypeptide according to the invention can correspond to all or a portion of a protein according to the invention. In one embodiment, a fusion protein comprises at least one biologically active portion of a protein according to the invention. In another embodiment, a fusion protein comprises at least two biologically active portions of a protein according to the invention. Within the fusion protein, the term “operatively linked” is intended to indicate that the polypeptide according to the invention and the other polypeptide are fused in-frame to each other. The polypeptide can be fused to the N-terminus or C-terminus.

[0131] For example, in one embodiment a fusion protein comprises a polypeptide according to the invention operably linked to the extracellular domain of a second protein. In another embodiment, the fusion protein is a GST-fusion protein in which the polypeptide sequences of the invention are fused to the C-terminus of the GST (i.e., glutathione S-transferase) sequences.

[0132] In another embodiment, the fusion protein is an immunoglobulin fusion protein in which the polypeptide sequences according to the invention comprise one or more domains fused to sequences derived from a member of the immunoglobulin protein family. The immunoglobulin fusion proteins of the invention can be incorporated into pharmaceutical compositions and administered to a subject to inhibit an interaction between a ligand and a protein of the invention on the surface of a cell, to thereby suppress signal transduction in vivo. The immunoglobulin fusion proteins can be used to affect the bioavailability of a cognate ligand. Inhibition of the ligand/protein interaction may be useful therapeutically for both the treatment of proliferative and differentiative disorders, e,g., cancer as well as modulating (e.g., promoting or inhibiting) cell survival. Moreover, the immunoglobulin fusion proteins of the invention can be used as immunogens to produce antibodies in a subject, to purify ligands, and in screening assays to identify molecules that inhibit the interaction of a polypeptide of the invention with a ligand.

[0133] A chimeric or fusion protein of the invention can be produced by standard recombinant DNA techniques. For example, DNA fragments coding for the different polypeptide sequences are ligated together in-frame in accordance with conventional techniques, e.g. by employing blunt-ended or stagger-ended termini for ligation, restriction enzyme digestion to provide for appropriate termini, filling-in of cohesive ends as appropriate, alkaline phosphatase treatment to avoid undesirable joining, and enzymatic ligation. In another embodiment, the fusion gene can be synthesized by conventional techniques including automated DNA synthesizers. Alternatively, PCR amplification of gene fragments can be carried out using anchor primers that give rise to complementary overhangs between two consecutive gene fragments that can subsequently be annealed and reamplified to generate a chimeric gene sequence (see, for example, Ausubel et al. (eds.) CURRENT PROTOCOLS IN MOLECULAR BIOLOGY, John Wiley & Sons, 1992). Moreover, many expression vectors are commercially available that already encode a fusion moiety (e.g., a GST polypeptide). A nucleic acid encoding a polypeptide of the invention can be cloned into such an expression vector such that the fusion moiety is linked in-frame to the protein of the invention.

### 4.8 Gene Therapy

[0134] Mutations in the polynucleotides of the invention may result in loss of normal function of the encoded protein. The invention thus provides gene therapy to restore normal activity of the polypeptides of the invention; or to treat disease states involving polypeptides of the invention. Delivery of a functional gene encoding polypeptides of the invention to appropriate cells is effected ex vivo, in situ, or in vivo by use of vectors, and more particularly viral vectors (e.g., adenovirus, adeno-associated virus, or a retrovirus), or ex vivo by use of physical DNA transfer methods (e.g., liposomes or chemical treatments). See, for example, Anderson, Nature, supplement to vol. 392, no. 6679, pp. 25-20 (1998). For additional reviews of gene therapy technology see Friedmann, Science, 244: 1275-1281 (1989); Verma, Scientific American: 68-84 (1990); and Miller, Nature, 357: 455-460 (1992). Introduction of any one of the nucleotides of the present invention or a gene encoding the polypeptides of the present invention can also be accomplished with extrachromosomal substrates (transient expression) or artificial chromosomes (stable expression). Cells may also be cultured ex vivo in the presence of proteins of the present invention in order to proliferate or to produce a desired effect on or activity in such cells. Treated cells can then be introduced in vivo for therapeutic purposes. Alternatively, it is contemplated that in other human disease states, preventing the expression of or inhibiting the activity of polypeptides of the invention will be useful in treating the disease states. It is contemplated that antisense therapy or gene therapy could be applied to negatively regulate the expression of polypeptides of the invention.

[0135] Other methods inhibiting expression of a protein include the introduction of antisense molecules to the nucleic acids of the present invention, their complements, or their translated RNA sequences, by methods known in the art. Further, the polypeptides of the present invention can be inhibited by using targeted deletion methods, or the insertion of a negative regulatory element such as a silencer, which is tissue specific.

[0136] The present invention still further provides cells genetically engineered in vivo to express the polynucleotides of the invention, wherein such polynucleotides are in operative association with a regulatory sequence heterologous to the host cell which drives expression of the polynucleotides in the cell. These methods can be used to increase or decrease the expression of the polynucleotides of the present invention.

[0137] Knowledge of DNA sequences provided by the invention allows for modification of cells to permit, increase, or decrease, expression of endogenous polypeptide. Cells can be modified (e.g., by homologous recombination) to provide increased polypeptide expression by replacing, in whole or in part, the naturally occurring promoter with all or part of a heterologous promoter so that the cells express the protein at higher levels. The heterologous promoter is inserted in such a manner that it is operatively linked to the desired protein encoding sequences. See, for example, PCT International Publication No. WO 94/12650, PCT International Publication No. WO 92/20808, and PCT International Publication No. WO 91/09955. It is also contemplated that, in addition to heterologous promoter DNA, amplifiable marker DNA (e.g., ada, dhfr, and the multifunctional CAD gene which encodes carbamyl phosphate synthase, aspartate transcarbamylase, and dihydroorotase) and/or intron DNA may be inserted along with the heterologous promoter DNA. If linked to the desired protein coding sequence, amplification of the marker DNA by standard selection methods results in co-amplification of the desired protein coding sequences in the cells.

[0138] In another embodiment of the present invention, cells and tissues may be engineered to express an endogenous gene comprising the polynucleotides of the invention under the control of inducible regulatory elements, in which case the regulatory sequences of the endogenous gene may be replaced by homologous recombination As described herein, gene targeting can be used to replace a gene's existing regulatory region with a regulatory sequence isolated from a different gene or a novel regulatory sequence synthesized by genetic engineering methods. Such regulatory sequences may be comprised of promoters, enhancers, scaffold-attachment regions, negative regulatory elements, transcriptional initiation sites, regulatory protein binding sites or combinations of said sequences. Alternatively, sequences which affect the structure or stability of the RNA or protein produced may be replaced, removed, added, or otherwise modified by targeting. These sequences include polyadenylation signals, mRNA stability elements, splice sites, leader sequences for enhancing or modifying transport or secretion properties of the protein, or other sequences which alter or improve the function or stability of protein or RNA molecules.

[0139] The targeting event may be a simple insertion of the regulatory sequence, placing the gene under the control of the new regulatory sequence, e.g., inserting a new promoter or enhancer or both upstream of a gene. Alternatively, the targeting event may be a simple deletion of a regulatory element, such as the deletion of a tissue-specific negative regulatory element. Alternatively, the targeting event may replace an existing element; for example, a tissue-specific enhancer can be replaced by an enhancer that has broader or different cell-type specificity than the naturally occurring elements. Here, the naturally occurring sequences are deleted and new sequences are added. In all cases, the identification of the targeting event may be facilitated by the use of one or more selectable marker genes that are contiguous with the targeting DNA, allowing for the selection of cells in which the exogenous DNA has integrated into the cell genome. The identification of the targeting event may also be facilitated by the use of one or more marker genes exhibiting the property of negative selection, such that the negatively selectable marker is linked to the exogenous DNA, but configured such that the negatively selectable marker flanks the targeting sequence, and such that a correct homologous recombination event with sequences in the host cell genome does not result in the stable integration of the negatively selectable marker. Markers useful for this purpose include the Herpes Simplex Virus thymidine kinase (TK) gene or the bacterial xanthine-guanine phosphoribosyl-transferase (gpt) gene.

[0140] The gene targeting or gene activation techniques which can be used in accordance with this aspect of the invention are more particularly described in U.S. Pat. No. 5,272,071 to Chappel; U.S. Pat. No. 5,578,461 to Sherwin et al.; International Application No. PCT/US92/09627 (WO93/09222) by Selden et al.; and International Application No. PCT/US90/06436 (WO91/06667) by Skoultchi et al., each of which is incorporated by reference herein in its entirety.

### 4.9 Transgenic Animals

[0141] In preferred methods to determine biological functions of the polypeptides of the invention in vivo, one or more genes provided by the invention are either over expressed or inactivated in the germ line of animals using homologous recombination [Capecchi, Science 244:1288-1292 (1989)]. Animals in which the gene is over expressed, under the regulatory control of exogenous or endogenous promoter elements, are known as transgenic animals. Animals in which an endogenous gene has been inactivated by homologous recombination are referred to as “knockout” animals. Knockout animals, preferably non-human mammals, can be prepared as described in U.S. Pat. No. 5,557,032, incorporated herein by reference. Transgenic animals are useful to determine the roles polypeptides of the invention play in biological processes, and preferably in disease states. Transgenic animals are useful as model systems to identify compounds that modulate lipid metabolism. Transgenic animals, preferably non-human mammals, are produced using methods as described in U.S. Pat. No 5,489,743 and PCT Publication No. WO94/28122, incorporated herein by reference.

[0142] Transgenic animals can be prepared wherein all or part of a promoter of the polynucleotides of the invention is either activated or inactivated to alter the level of expression of the polypeptides of the invention. Inactivation can be carried out using homologous recombination methods described above. Activation can be achieved by supplementing or even replacing the homologous promoter to provide for increased protein expression. The homologous promoter can be supplemented by insertion of one or more heterologous enhancer elements known to confer promoter activation in a particular tissue.

[0143] The polynucleotides of the present invention also make possible the development, through, e.g., homologous recombination or knock out strategies, of animals that fail to express polypeptides of the invention or that express a variant polypeptide. Such animals are useful as models for studying the in vivo activities of polypeptide as well as for studying modulators of the polypeptides of the invention.

[0144] In preferred methods to determine biological functions of the polypeptides of the invention in vivo, one or more genes provided by the invention are either over expressed or inactivated in the germ line of animals using homologous recombination [Capecchi, Science 244:1288-1292 (1989)]. Animals in which the gene is over expressed, under the regulatory control of exogenous or endogenous promoter elements, are known as transgenic animals. Animals in which an endogenous gene has been inactivated by homologous recombination are referred to as “knockout” animals. Knockout animals, preferably non-human mammals, can be prepared as described in U.S. Pat. No. 5,557,032, incorporated herein by reference. Transgenic animals are useful to determine the roles polypeptides of the invention play in biological processes, and preferably in disease states. Transgenic animals are useful as model systems to identify compounds that modulate lipid metabolism. Transgenic animals, preferably non-human mammals, are produced using methods as described in U.S. Pat. No. 5,489,743 and PCT Publication No. WO94/28122, incorporated herein by reference.

[0145] Transgenic animals can be prepared wherein all or part of the polynucleotides of the invention promoter is either activated or inactivated to alter the level of expression of the polypeptides of the invention. Inactivation can be carried out using homologous recombination methods described above. Activation can be achieved by supplementing or even replacing the homologous promoter to provide for increased protein expression. The homologous promoter can be supplemented by insertion of one or more heterologous enhancer elements known to confer promoter activation in a particular tissue.

### 4.10 Uses and Biological Activity

[0146] The polynucleotides and proteins of the present invention are expected to exhibit one or more of the uses or biological activities (including those associated with assays cited herein) identified herein. Uses or activities described for proteins of the present invention may be provided by administration or use of such proteins or of polynucleotides encoding such proteins (such as, for example, in gene therapies or vectors suitable for introduction of DNA). The mechanism underlying the particular condition or pathology will dictate whether the polypeptides of the invention, the polynucleotides of the invention or modulators (activators or inhibitors) thereof would be beneficial to the subject in need of treatment. Thus, “therapeutic compositions of the invention” include compositions comprising isolated polynucleotides (including recombinant DNA molecules, cloned genes and degenerate variants thereof) or polypeptides of the invention (including full length protein, mature protein and truncations or domains thereof), or compounds and other substances that modulate the overall activity of the target gene products, either at the level of target gene/protein expression or target protein activity. Such modulators include polypeptides, analogs, (variants), including fragments and fusion proteins, antibodies and other binding proteins; chemical compounds that directly or indirectly activate or inhibit the polypeptides of the invention (identified, e.g., via drug screening assays as described herein); antisense polynucleotides and polynucleotides suitable for triple helix formation; and in particular antibodies or other binding partners that specifically recognize one or more epitopes of the polypeptides of the invention.

[0147] The polypeptides of the present invention may likewise be involved in cellular activation or in one of the other physiological pathways described herein.

### 4.10.1 Research Uses and Utilities

[0148] The polynucleotides provided by the present invention can be used by the research community for various purposes. The polynucleotides can be used to express recombinant protein for analysis, characterization or therapeutic use; as markers for tissues in which the corresponding protein is preferentially expressed (either constitutively or at a particular stage of tissue differentiation or development or in disease states); as molecular weight markers on gels; as chromosome markers or tags (when labeled) to identify chromosomes or to map related gene positions; to compare with endogenous DNA sequences in patients to identify potential genetic disorders; as probes to hybridize and thus discover novel, related DNA sequences; as a source of information to derive PCR primers for genetic fingerprinting; as a probe to “subtract-out” known sequences in the process of discovering other novel polynucleotides; for selecting and making oligomers for attachment to a “gene chip” or other support, including for examination of expression patterns; to raise anti-protein antibodies using DNA immunization techniques; and as an antigen to raise anti-DNA antibodies or elicit another immune response. Where the polynucleotide encodes a protein which binds or potentially binds to another protein (such as, for example, in a receptor-ligand interaction), the polynucleotide can also be used in interaction trap assays (such as, for example, that described in Gyuris et al., Cell 75:791-803 (1993)) to identify polynucleotides encoding the other protein with which binding occurs or to identify inhibitors of the binding interaction.

[0149] The polypeptides provided by the present invention can similarly be used in assays to determine biological activity, including in a panel of multiple proteins for high-throughput screening; to raise antibodies or to elicit another immune response; as a reagent (including the labeled reagent) in assays designed to quantitatively determine levels of the protein (or its receptor) in biological fluids; as markers for tissues in which the corresponding polypeptide is preferentially expressed (either constitutively or at a particular stage of tissue differentiation or development or in a disease state); and, of course, to isolate correlative receptors or ligands. Proteins involved in these binding interactions can also be used to screen for peptide or small molecule inhibitors or agonists of the binding interaction.

[0150] Any or all of these research utilities are capable of being developed into reagent grade or kit format for commercialization as research products.

[0151] Methods for performing the uses listed above are well known to those skilled in the art. References disclosing such methods include without limitation “Molecular Cloning: A Laboratory Manual”, 2d ed., Cold Spring Harbor Laboratory Press, Sambrook, J., E. F. Fritsch and T. Maniatis eds., 1989, and “Methods in Enzymology: Guide to Molecular Cloning Techniques”, Academic Press, Berger, S. L. and A. R. Kimmel eds., 1987.

### 4.10.2 Nutritional Uses

[0152] Polynucleotides and polypeptides of the present invention can also be used as nutritional sources or supplements. Such uses include without limitation use as a protein or amino acid supplement, use as a carbon source, use as a nitrogen source and use as a source of carbohydrate. In such cases the polypeptide or polynucleotide of the invention can be added to the feed of a particular organism or can be administered as a separate solid or liquid preparation, such as in the form of powder, pills, solutions, suspensions or capsules. In the case of microorganisms, the polypeptide or polynucleotide of the invention can be added to the medium in or on which the microorganism is cultured.

### 4.10.3 Cytokine and Cell Proliferation/Differentiation Activity

[0153] A polypeptide of the present invention may exhibit activity relating to cytokine, cell proliferation (either inducing or inhibiting) or cell differentiation (either inducing or inhibiting) activity or may induce production of other cytokines in certain cell populations. A polynucleotide of the invention can encode a polypeptide exhibiting such attributes. Many protein factors discovered to date, including all known cytokines, have exhibited activity in one or more factor-dependent cell proliferation assays, and hence the assays serve as a convenient confirmation of cytokine activity. The activity of therapeutic compositions of the present invention is evidenced by any one of a number of routine factor dependent cell proliferation assays for cell lines including, without limitation, 32D, DA2, DA1G, T10, B9, B9/11, BaF3, MC9/G, M+(preB M+), 2E8, RB5, DA1, 123, T1165, HT2, CTLL2, TF-1, Mo7e, CMK, HUVEC, and Caco. Therapeutic compositions of the invention can be used in the following:

[0154] Assays for T-cell or thymocyte proliferation include without limitation those described in: Current Protocols in Immunology, Ed by J. E. Coligan, A. M. Kruisbeek, D. H. Margulies, E. M. Shevach, W. Strober, Pub. Greene Publishing Associates and Wiley-Interscience (Chapter 3, In Vitro assays for Mouse Lymphocyte Function 3.1-3.19; Chapter 7, Immunologic studies in Humans); Takai et al., J. Immunol. 137:3494-3500, 1986; Bertagnolli et al., J. Immunol. 145:1706-1712, 1990; Bertagnolli et al., Cellular Immunology 133:327-341, 1991; Bertagnolli, et al., I. Immunol. 149:3778-3783, 1992; Bowman et al., I. Immunol. 152:1756-1761, 1994.

[0155] Assays for cytokine production and/or proliferation of spleen cells, lymph node cells or thymocytes include, without limitation, those described in: Polyclonal T cell stimulation, Kruisbeek, A. M. and Shevach, E. M. In Current Protocols in Immunology. J. E. e.a. Coligan eds. Vol 1 pp. 3.12.1-3.12.14, John Wiley and Sons, Toronto. 1994; and Measurement of mouse and human interleukin-γ, Schreiber, R. D. In Current Protocols in Immunology. J. E. e.a. Coligan. eds. Vol 1 pp. 6.8.1-6.8.8, John Wiley and Sons, Toronto. 1994.

[0156] Assays for proliferation and differentiation of hematopoietic and lymphopoietic cells include, without limitation, those described in: Measurement of Human and Murine Interleukin 2 and Interleukin 4, Bottomly, K., Davis, L. S. and Lipsky, P. E. In Current Protocols in Immunology. J. E. e.a. Coligan eds. Vol 1 pp. 6.3.1-6.3.12, John Wiley and Sons, Toronto. 1991; deVries et al., J. Exp. Med. 173:1205-1211, 1991; Moreau et al., Nature 336:690-692, 1988; Greenberger et al., Proc. Natl. Acad. Sci. U.S.A. 80:2931-2938, 1983; Measurement of mouse and human interleukin 6-Nordan, R. In Current Protocols in Immunology. J. E. Coligan eds. Vol 1 pp. 6.6.1-6.6.5, John Wiley and Sons, Toronto. 1991; Smith et al., Proc. Natl. Aced. Sci. U.S.A. 83:1857-1861, 1986; Measurement of human Interleukin 11-Bennett, F., Giannotti, J., Clark, S. C. and Turner, K. J. In Current Protocols in Immunology. J. E. Coligan eds. Vol 1 pp. 6.15.1 John Wiley and Sons, Toronto. 1991; Measurement of mouse and human Interleukin 9-Ciarletta, A., Giannotti, J., Clark, S. C. and Turner, K. J. In Current Protocols in Immunology. J. E. Coligan eds. Vol 1 pp. 6.13.1, John Wiley and Sons, Toronto. 1991.

[0157] Assays for T-cell clone responses to antigens (which will identify, among others, proteins that affect APC-T cell interactions as well as direct T-cell effects by measuring proliferation and cytokine production) include, without limitation, those described in: Current Protocols in Immunology, Ed by J. E. Coligan, A. M. Kruisbeek, D. H. Margulies, E. M. Shevach, W Strober, Pub. Greene Publishing Associates and Wiley-Interscience (Chapter 3, In Vitro assays for Mouse Lymphocyte Function; Chapter 6, Cytokines and their cellular receptors; Chapter 7, Immunologic studies in Humans); Weinberger et al., Proc. Natl. Acad. Sci. USA 77:6091-6095, 1980; Weinberger et al., Eur. J. Immun. 11:405-411, 1981; Takai et al., J. Immunol. 137:3494-3500, 1986; Takai et al., J. Immunol. 140:508-512, 1988.

### 4.10.4 Stem Cell Growth Factor Activity

[0158] A polypeptide of the present invention may exhibit stem cell growth factor activity and be involved in the proliferation, differentiation and survival of pluripotent and totipotent stem cells including primordial germ cells, embryonic stem cells, hematopoietic stem cells and/or germ line stem cells. Administration of the polypeptide of the invention to stem cells in vivo or ex vivo is expected to maintain and expand cell populations in a totipotential or pluripotential state which would be useful for re-engineering damaged or diseased tissues, transplantation, manufacture of bio-pharmaceuticals and the development of bio-sensors. The ability to produce large quantities of human cells has important working applications for the production of human proteins which currently must be obtained from non-human sources or donors, implantation of cells to treat diseases such as Parkinson's, Alzheimer's and other neurodegenerative diseases; tissues for grafting such as bone marrow, skin, cartilage, tendons, bone, muscle (including cardiac muscle), blood vessels, cornea, neural cells, gastrointestinal cells and others; and organs for transplantation such as kidney, liver, pancreas (including islet cells), heart and lung.

[0159] It is contemplated that multiple different exogenous growth factors and/or cytokines may be administered in combination with the polypeptide of the invention to achieve the desired effect, including any of the growth factors listed herein, other stem cell maintenance factors, and specifically including stem cell factor (SCF), leukemia inhibitory factor (LIF), Flt-3 ligand (Flt-3L), any of the interleukins, recombinant soluble IL-6 receptor fused to IL-6, macrophage inflammatory protein 1-alpha (MIP-1-alpha), G-CSF, GM-CSF, thrombopoietin (TPO), platelet factor 4 (PF-4), platelet-derived growth factor (PDGF), neural growth factors and basic fibroblast growth factor (bFGF).

[0160] Since totipotent stem cells can give rise to virtually any mature cell type, expansion of these cells in culture will facilitate the production of large quantities of mature cells. Techniques for culturing stem cells are known in the art and administration of polypeptides of the invention, optionally with other growth factors and/or cytokines, is expected to enhance the survival and proliferation of the stem cell populations. This can be accomplished by direct administration of the polypeptide of the invention to the culture medium. Alternatively, stroma cells transfected with a polynucleotide that encodes for the polypeptide of the invention can be used as a feeder layer for the stem cell populations in culture or in vivo. Stromal support cells for feeder layers may include embryonic bone marrow fibroblasts, bone marrow stromal cells, fetal liver cells, or cultured embryonic fibroblasts (see U.S. Pat. No. 5,690,926).

[0161] Stem cells themselves can be transfected with a polynucleotide of the invention to induce autocrine expression of the polypeptide of the invention. This will allow for generation of undifferentiated totipotential/pluripotential stem cell lines that are useful as is or that can then be differentiated into the desired mature cell types. These stable cell lines can also serve as a source of undifferentiated totipotential/pluripotential mRNA to create cDNA libraries and templates for polymerase chain reaction experiments. These studies would allow for the isolation and identification of differentially expressed genes in stem cell populations that regulate stem cell proliferation and/or maintenance.

[0162] Expansion and maintenance of totipotent stem cell populations will be useful in the treatment of many pathological conditions. For example, polypeptides of the present invention may be used to manipulate stem cells in culture to give rise to neuroepithelial cells that can be used to augment or replace cells damaged by illness, autoimmune disease, accidental damage or genetic disorders. The polypeptide of the invention may be useful for inducing the proliferation of neural cells and for the regeneration of nerve and brain tissue, i.e. for the treatment of central and peripheral nervous system diseases and neuropathies, as well as mechanical and traumatic disorders which involve degeneration, death or trauma to neural cells or nerve tissue. In addition, the expanded stem cell populations can also be genetically altered for gene therapy purposes and to decrease host rejection of replacement tissues after grafting or implantation.

[0163] Expression of the polypeptide of the invention and its effect on stem cells can also be manipulated to achieve controlled differentiation of the stem cells into more differentiated cell types. A broadly applicable method of obtaining pure populations of a specific differentiated cell type from undifferentiated stem cell populations involves the use of a cell-type specific promoter driving a selectable marker. The selectable marker allows only cells of the desired type to survive. For example, stem cells can be induced to differentiate into cardiomyocytes (Wobus et al., Differentiation, 48: 173-182, (1991); Klug et al., J. Clin. Invest., 98(1): 21&224, (1998)) or skeletal muscle cells (Browder, L. W. In: Principles of Tissue Engineering eds. Lanza et al., Academic Press (1997)). Alternatively, directed differentiation of stem cells can be accomplished by culturing the stem cells in the presence of a differentiation factor such as retinoic acid and an antagonist of the polypeptide of the invention which would inhibit the effects of endogenous stem cell factor activity and allow differentiation to proceed.

[0164] In vitro cultures of stem cells can be used to determine if the polypeptide of the invention exhibits stem cell growth factor activity. Stem cells are isolated from any one of various cell sources (including hematopoietic stem cells and embryonic stem cells) and cultured on a feeder layer, as described by Thompson et al. Proc. Natl. Acad. Sci, U.S.A., 92: 7844-7848 (1995), in the presence of the polypeptide of the invention alone or in combination with other growth factors or cytokines. The ability of the polypeptide of the invention to induce stem cells proliferation is determined by colony formation on semi-solid support e.g. as described by Bernstein et al., Blood, 77: 2316-2321 (1991).

### 4.10.5 Hematopoiesis Regulating Activity

[0165] A polypeptide of the present invention may be involved in regulation of hematopoiesis and, consequently, in the treatment of myeloid or lymphoid cell disorders. Even marginal biological activity in support of colony forming cells or of factor-dependent cell lines indicates involvement in regulating hematopoiesis, e.g. in supporting the growth and proliferation of erythroid progenitor cells alone or in combination with other cytokines, thereby indicating utility, for example, in treating various anemias or for use in conjunction with irradiation/chemotherapy to stimulate the production of erythroid precursors and/or erythroid cells; in supporting the growth and proliferation of myeloid cells such as granulocytes and monocytes/macrophages (i.e., traditional CSF activity) useful, for example, in conjunction with chemotherapy to prevent or treat consequent myelo-suppression; in supporting the growth and proliferation of megakaryocytes and consequently of platelets thereby allowing prevention or treatment of various platelet disorders such as thrombocytopenia, and generally for use in place of or complimentary to platelet transfusions; and/or in supporting the growth and proliferation of hematopoietic stem cells which are capable of maturing to any and all of the above-mentioned hematopoietic cells and therefore find therapeutic utility in various stem cell disorders (such as those usually treated with transplantation, including, without limitation, aplastic anemia and paroxysmal nocturnal hemoglobinuria), as well as in repopulating the stem cell compartment post irradiation/chemotherapy, either in-vivo or ex-vivo (i.e., in conjunction with bone marrow transplantation or with peripheral progenitor cell transplantation (homologous or heterologous)) as normal cells or genetically manipulated for gene therapy.

[0166] Therapeutic compositions of the invention can be used in the following:

[0167] Suitable assays for proliferation and differentiation of various hematopoietic lines are cited above.

[0168] Assays for embryonic stem cell differentiation (which will identify, among others, proteins that influence embryonic differentiation hematopoiesis) include, without limitation, those described in: Johansson et al. Cellular Biology 15:141-151, 1995; Keller et al., Molecular and Cellular Biology 13:473-486, 1993; McClanahan et al., Blood 81:2903-2915, 1993.

[0169] Assays for stem cell survival and differentiation (which will identify, among others, proteins that regulate lympho-hematopoiesis) include, without limitation, those described in: Methylcellulose colony forming assays, Freshney, M. G. In Culture of Hematopoietic Cells. R. I. Freshney, et al. eds. Vol pp. 265-268, Wiley-Liss, Inc., New York, N.Y. 1994; Hirayama et al., Proc. Natl. Acad. Sci. USA 89:5907-5911, 1992; Primitive hematopoietic colony forming cells with high proliferative potential, McNiece, I. K. and Briddell, R. A. In Culture of Hematopoietic Cells. R. I. Freshney, et al. eds. Vol pp. 23-39, Wiley-Liss, Inc., New York, N.Y. 1994; Neben et al., Experimental Hematology 22:353-359, 1994; Cobblestone area forming cell assay, Ploemacher, R. E. In Culture of Hematopoietic Cells. R. I. Freshney, et al. eds. Vol pp. 1-21, Wiley-Liss, Inc., New York, N.Y. 1994; Long term bone marrow cultures in the presence of stromal cells, Spooncer, E., Dexter, M. and Allen, T. In Culture of Hematopoietic Cells. R. I. Freshney, et al. eds. Vol pp. 163-179, Wiley-Liss, Inc., New York, N.Y. 1994; Long term culture initiating cell assay, Sutherland, H. J. In Culture of Hematopoietic Cells. R. I. Freshney, et al. eds. Vol pp. 139-162, Wiley-Liss, Inc., New York, N.Y. 1994.

### 4.10.6 Tissue Growth Activity

[0170] A polypeptide of the present invention also may be involved in bone, cartilage, tendon, ligament and/or nerve tissue growth or regeneration, as well as in wound healing and tissue repair and replacement, and in healing of burns, incisions and ulcers.

[0171] A polypeptide of the present invention which induces cartilage and/or bone growth in circumstances where bone is not normally formed, has application in the healing of bone fractures and cartilage damage or defects in humans and other animals. Compositions of a polypeptide, antibody, binding partner, or other modulator of the invention may have prophylactic use in closed as well as open fracture reduction and also in the improved fixation of artificial joints. De novo bone formation induced by an osteogenic agent contributes to the repair of congenital, trauma induced, or oncologic resection induced craniofacial defects, and also is useful in cosmetic plastic surgery.

[0172] A polypeptide of this invention may also be involved in attracting bone-forming cells, stimulating growth of bone-forming cells, or inducing differentiation of progenitors of bone-forming cells. Treatment of osteoporosis, osteoarthritis, bone degenerative disorders, or periodontal disease, such as through stimulation of bone and/or cartilage repair or by blocking inflammation or processes of tissue destruction (collagenase activity, osteoclast activity, etc.) mediated by inflammatory processes may also be possible using the composition of the invention.

[0173] Another category of tissue regeneration activity that may involve the polypeptide of the present invention is tendon/ligament formation. Induction of tendon/ligament-like tissue or other tissue formation in circumstances where such tissue is not normally formed, has application in the healing of tendon or ligament tears, deformities and other tendon or ligament defects in humans and other animals. Such a preparation employing a tendon/ligament-like tissue inducing protein may have prophylactic use in preventing damage to tendon or ligament tissue, as well as use in the improved fixation of tendon or ligament to bone or other tissues, and in repairing defects to tendon or ligament tissue. De novo tendon/ligament-like tissue formation induced by a composition of the present invention contributes to the repair of congenital, trauma induced, or other tendon or ligament defects of other origin, and is also useful in cosmetic plastic surgery for attachment or repair of tendons or ligaments. The compositions of the present invention may provide environment to attract tendon- or ligament-forming cells, stimulate growth of tendon- or ligament-forming cells, induce differentiation of progenitors of tendon- or ligament-forming cells, or induce growth of tendon/ligament cells or progenitors ex vivo for return in vivo to effect tissue repair. The compositions of the invention may also be useful in the treatment of tendinitis, carpal tunnel syndrome and other tendon or ligament defects. The compositions may also include an appropriate matrix and/or sequestering agent as a carrier as is well known in the art.

[0174] The compositions of the present invention may also be useful for proliferation of neural cells and for regeneration of nerve and brain tissue, i.e. for the treatment of central and peripheral nervous system diseases and neuropathies, as well as mechanical and traumatic disorders, which involve degeneration, death or trauma to neural cells or nerve tissue. More specifically, a composition may be used in the treatment of diseases of the peripheral nervous system, such as peripheral nerve injuries, peripheral neuropathy and localized neuropathies, and central nervous system diseases, such as Alzheimer's, Parkinson's disease, Huntington's disease, amyotrophic lateral sclerosis, and Shy-Drager syndrome. Further conditions which may be treated in accordance with the present invention include mechanical and traumatic disorders, such as spinal cord disorders, head trauma and cerebrovascular diseases such as stroke. Peripheral neuropathies resulting from chemotherapy or other medical therapies may also be treatable using a composition of the invention.

[0175] Compositions of the invention may also be useful to promote better or faster closure of non-healing wounds, including without limitation pressure ulcers, ulcers associated with vascular insufficiency, surgical and traumatic wounds, and the like.

[0176] Compositions of the present invention may also be involved in the generation or regeneration of other tissues, such as organs (including, for example, pancreas, liver, intestine, kidney, skin, endothelium), muscle (smooth, skeletal or cardiac) and vascular (including vascular endothelium) tissue, or for promoting the growth of cells comprising such tissues. Part of the desired effects may be by inhibition or modulation of fibrotic scarring may allow normal tissue to regenerate. A polypeptide of the present invention may also exhibit angiogenic activity.

[0177] A composition of the present invention may also be useful for gut protection or regeneration and treatment of lung or liver fibrosis, reperfusion injury in various tissues, and conditions resulting from systemic cytokine damage.

[0178] A composition of the present invention may also be useful for promoting or inhibiting differentiation of tissues described above from precursor tissues or cells; or for inhibiting the growth of tissues described above.

[0179] Therapeutic compositions of the invention can be used in the following:

[0180] Assays for tissue generation activity include, without limitation, those described in: International Patent Publication No. WO95/16035 (bone, cartilage, tendon); International Patent Publication No. WO95/05846 (nerve, neuronal); International Patent Publication No. WO91/07491 (skin, endothelium).

[0181] Assays for wound healing activity include, without limitation, those described in: Winter, Epidermal Wound Healing, pps. 71-112 (Maibach, H. I. and Rovee, D. T., eds.), Year Book Medical Publishers, Inc., Chicago, as modified by Eaglstein and Mertz, J. Invest. Dermatol 71:382-84 (1978).

### 4.10.7 Immune Stimulating or Suppressing Activity

[0182] A polypeptide of the present invention may also exhibit immune stimulating or immune suppressing activity, including without limitation the activities for which assays are described herein. A polynucleotide of the invention can encode a polypeptide exhibiting such activities. A protein may be useful in the treatment of various immune deficiencies and disorders (including severe combined immunodeficiency (SCID)), e.g., in regulating (up or down) growth and proliferation of T and/or B lymphocytes, as well as effecting the cytolytic activity of NK cells and other cell populations. These immune deficiencies may be genetic or be caused by viral (e.g., HIV) as well as bacterial or fungal infections, or may result from autoimmune disorders. More specifically, infectious diseases causes by viral, bacterial, fungal or other infection may be treatable using a protein of the present invention, including infections by HIV, hepatitis viruses, herpes viruses, mycobacteria, Leishmania spp., malaria spp. and various fungal infections such as candidiasis. Of course, in this regard, proteins of the present invention may also be useful where a boost to the immune system generally may be desirable, i.e., in the treatment of cancer.

[0183] Autoimmune disorders which may be treated using a protein of the present invention include, for example, connective tissue disease, multiple sclerosis, systemic lupus erythematosus, rheumatoid arthritis, autoimmune pulmonary inflammation, Guillain-Barre syndrome, autoimmune thyroiditis, insulin dependent diabetes mellitis, myasthenia gravis, graft-versus-host disease and autoimmune inflammatory eye disease. Such a protein (or antagonists thereof, including antibodies) of the present invention may also to be useful in the treatment of allergic reactions and conditions (e.g., anaphylaxis, serum sickness, drug reactions, food allergies, insect venom allergies, mastocytosis, allergic rhinitis, hypersensitivity pneumonitis, urticaria, angioedema, eczema, atopic dermatitis, allergic contact dermatitis, erythema multiforme, Stevens-Johnson syndrome, allergic conjunctivitis, atopic keratoconjunctivitis, venereal keratoconjunctivitis, giant papillary conjunctivitis and contact allergies), such as asthma (particularly allergic asthma) or other respiratory problems. Other conditions, in which immune suppression is desired (including, for example, organ transplantation), may also be treatable using a protein (or antagonists thereof) of the present invention. The therapeutic effects of the polypeptides or antagonists thereof on allergic reactions can be evaluated by in vivo animals models such as the cumulative contact enhancement test (Lastbom et al., Toxicology 125: 59-66, 1998), skin prick test (Hoffmann et al., Allergy 54: 446-54, 1999), guinea pig skin sensitization test (Vohr et al., Arch. Toxocol. 73: 501-9), and murine local lymph node assay (Kimber et al., J. Toxicol. Environ. Health 53: 563-79).

[0184] Using the proteins of the invention it may also be possible to modulate immune responses, in a number of ways. Down regulation may be in the form of inhibiting or blocking an immune response already in progress or may involve preventing the induction of an immune response. The functions of activated T cells may be inhibited by suppressing T cell responses or by inducing specific tolerance in T cells, or both. Immunosuppression of T cell responses is generally an active, non-antigen-specific, process which requires continuous exposure of the T cells to the suppressive agent. Tolerance, which involves inducing non-responsiveness or anergy in T cells, is distinguishable from immunosuppression in that it is generally antigen-specific and persists after exposure to the tolerizing agent has ceased. Operationally, tolerance can be demonstrated by the lack of a T cell response upon reexposure to specific antigen in the absence of the tolerizing agent.

[0185] Down regulating or preventing one or more antigen functions (including without limitation B lymphocyte antigen functions (such as, for example, B7)), e.g., preventing high level lymphokine synthesis by activated T cells, will be useful in situations of tissue, skin and organ transplantation and in graft-versus-host disease (GVHD). For example, blockage of T cell function should result in reduced tissue destruction in tissue transplantation. Typically, in tissue transplants, rejection of the transplant is initiated through its recognition as foreign by T cells, followed by an immune reaction that destroys the transplant. The administration of a therapeutic composition of the invention may prevent cytokine synthesis by immune cells, such as T cells, and thus acts as an immunosuppressant. Moreover, a lack of costimulation may also be sufficient to anergize the T cells, thereby inducing tolerance in a subject. Induction of long-term tolerance by B lymphocyte antigen-blocking reagents may avoid the necessity of repeated administration of these blocking reagents. To achieve sufficient immunosuppression or tolerance in a subject, it may also be necessary to block the function of a combination of B lymphocyte antigens.

[0186] The efficacy of particular therapeutic compositions in preventing organ transplant rejection or GVHD can be assessed using animal models that are predictive of efficacy in humans. Examples of appropriate systems which can be used include allogeneic cardiac grafts in rats and xenogeneic pancreatic islet cell grafts in mice, both of which have been used to examine the immunosuppressive effects of CTLA4Ig fusion proteins in vivo as described in Lenschow et al., Science 257:789-792 (1992) and Turka et al., Proc. Natl. Acad. Sci USA, 89:11102-11105 (1992). In addition, murine models of GVHD (see Paul ed., Fundamental Immunology, Raven Press, New York, 1989, pp. 846-847) can be used to determine the effect of therapeutic compositions of the invention on the development of that disease.

[0187] Blocking antigen function may also be therapeutically useful for treating autoimmune diseases. Many autoimmune disorders are the result of inappropriate activation of T cells that are reactive against self tissue and which promote the production of cytokines and autoantibodies involved in the pathology of the diseases. Preventing the activation of autoreactive T cells may reduce or eliminate disease symptoms. Administration of reagents which block stimulation of T cells can be used to inhibit T cell activation and prevent production of autoantibodies or T cell-derived cytokines which may be involved in the disease process. Additionally, blocking reagents may induce antigen-specific tolerance of autoreactive T cells which could lead to long-term relief from the disease. The efficacy of blocking reagents in preventing or alleviating autoimmune disorders can be determined using a number of well-characterized animal models of human autoimmune diseases. Examples include murine experimental autoimmune encephalitis, systemic lupus erythmatosis in MRL/Ipr/Ipr mice or NZB hybrid mice, murine autoimmune collagen arthritis, diabetes mellitus in NOD mice and BB rats, and murine experimental myasthenia gravis (see Paul ed., Fundamental Immunology, Raven Press, New York, 1989, pp. 840-856).

[0188] Upregulation of an antigen function (e.g., a B lymphocyte antigen function), as a means of up regulating immune responses, may also be useful in therapy. Upregulation of immune responses may be in the form of enhancing an existing immune response or eliciting an initial immune response. For example, enhancing an immune response may be useful in cases of viral infection, including systemic viral diseases such as influenza, the common cold, and encephalitis.

[0189] Alternatively, anti-viral immune responses may be enhanced in an infected patient by removing T cells from the patient, costimulating the T cells in vitro with viral antigen-pulsed APCs either expressing a peptide of the present invention or together with a stimulatory form of a soluble peptide of the present invention and reintroducing the in vitro activated T cells into the patient. Another method of enhancing anti-viral immune responses would be to isolate infected cells from a patient, transfect them with a nucleic acid encoding a protein of the present invention as described herein such that the cells express all or a portion of the protein on their surface, and reintroduce the transfected cells into the patient. The infected cells would now be capable of delivering a costimulatory signal to, and thereby activate, T cells in vivo.

[0190] A polypeptide of the present invention may provide the necessary stimulation signal to T cells to induce a T cell mediated immune response against the transfected tumor cells. In addition, tumor cells which lack MHC class I or MHC class II molecules, or which fail to reexpress sufficient mounts of MHC class I or MHC class II molecules, can be transfected with nucleic acid encoding all or a portion of (e.g., a cytoplasmic-domain truncated portion) of an MHC class I alpha chain protein and β₂ microglobulin protein or an MHC class II alpha chain protein and an MHC class II beta chain protein to thereby express MHC class I or MHC class II proteins on the cell surface. Expression of the appropriate class I or class II MHC in conjunction with a peptide having the activity of a B lymphocyte antigen (e.g., B7-1, B7-2, B7-3) induces a T cell mediated immune response against the transfected tumor cell. Optionally, a gene encoding an antisense construct which blocks expression of an MHC class II associated protein, such as the invariant chain, can also be cotransfected with a DNA encoding a peptide having the activity of a B lymphocyte antigen to promote presentation of tumor associated antigens and induce tumor specific immunity. Thus, the induction of a T cell mediated immune response in a human subject may be sufficient to overcome tumor-specific tolerance in the subject.

[0191] The activity of a protein of the invention may, among other means, be measured by the following methods:

[0192] Suitable assays for thymocyte or splenocyte cytotoxicity include, without limitation, those described in: Current Protocols in Immunology, Ed by J. E. Coligan, A. M. Kruisbeek, D. H. Margulies, E. M. Shevach, W. Strober, Pub. Greene Publishing Associates and Wiley-Interscience (Chapter 3, In Vitro assays for Mouse Lymphocyte Function 3.1-3.19; Chapter 7, Immunologic studies in Humans); Herrmann et al., Proc. Natl. Acad. Sci. USA 78:2488-2492, 1981; Herrmann et al., J. Immunol. 128:1968-1974, 1982; Handa et al., J. Immunol. 135:1564-1572, 1985; Takai et al., I. Immunol. 137:3494-3500, 1986; Takai et al., J. Immunol. 140:508-512, 1988; Bowman et al., J. Virology 61:1992-1998; Bertagnolli et al., Cellular Immunology 133:327-341, 1991; Brown et al., J. Immunol. 153:3079-3092, 1994.

[0193] Assays for T-cell-dependent imnmunoglobulin responses and isotype switching (which will identify, among others, proteins that modulate T-cell dependent antibody responses and that affect Th1/Th2 profiles) include, without limitation, those described in: Maliszewski, J. Immunol. 144:3028-3033, 1990; and Assays for B cell function: In vitro antibody production, Mond, J. J. and Brunswick, M. In Current Protocols in Immunology. J. E. e.a. Coligan eds. Vol 1 pp. 3.8.1-3.8.16, John Wiley and Sons, Toronto. 1994.

[0194] Mixed lymphocyte reaction (MLR) assays (which will identify, among others, proteins that generate predominantly Th1 and CTL responses) include, without limitation, those described in: Current Protocols in Immunology, Ed by J. E. Coligan, A. M. Kruisbeek, D. H. Margulies, E. M. Shevach, W. Strober, Pub. Greene Publishing Associates and Wiley-Interscience (Chapter 3, In Vitro assays for Mouse Lymphocyte Function 3.1-3.19; Chapter 7, Immunologic studies in Humans); Takai et al., J. Immunol. 137:3494-3500, 1986; Takai et al., J. Immunol. 140:508-512, 1988; Bertagnolli et al., J. Immunol. 149:3778-3783, 1992.

[0195] Dendritic cell-dependent assays (which will identify, among others, proteins expressed by dendritic cells that activate naive T-cells) include, without limitation, those described in: Guery et al., J. Immunol. 134:536-544, 1995; Inaba et al., Journal of Experimental Medicine 173:549-559, 1991; Macatonia et al., Journal of Immunology 154:5071-5079, 1995; Porgador et al., Journal of Experimental Medicine 182:255-260, 1995; Nair et al., Journal of Virology 67:4062-4069, 1993; Huang et al., Science 264:961-965, 1994; Macatonia et al., Journal of Experimental Medicine 169:1255-1264, 1989; Bhardwaj et al., Journal of Clinical Investigation 94:797-807, 1994; and Inaba et al., Journal of Experimental Medicine 172:631-640, 1990.

[0196] Assays for lymphocyte survival/apoptosis (which will identify, among others, proteins that prevent apoptosis after superantigen induction and proteins that regulate lymphocyte homeostasis) include, without limitation, those described in: Darzynkiewicz et al., Cytometry 13:795-808, 1992; Gorczyca et al., Leukemia 7:659-670, 1993; Gorczyca et al., Cancer Research 53:1945-1951, 1993; Itoh et al., Cell 66:233-243, 1991; Zacharchuk, Journal of Immunology 145:4037-4045, 1990; Zamai et al., Cytometry 14:891-897, 1993; Gorczyca et al., International Journal of Oncology 1:639-648, 1992.

[0197] Assays for proteins that influence early steps of T-cell commitment and development include, without limitation, those described in: Antica et al., Blood 84:111-117, 1994; Fine et al., Cellular Immunology 155:111-122, 1994; Galy et al., Blood 85:2770-2778, 1995; Toki et al., Proc. Nat. Acad Sci. USA 88:7548-7551, 1991.

### 4.10.8 Activin/Inhibin Activity

[0198] A polypeptide of the present invention may also exhibit activin- or inhibin-related activities. A polynucleotide of the invention may encode a polypeptide exhibiting such characteristics. Inhibins are characterized by their ability to inhibit the release of follicle stimulating hormone (FSH), while activins and are characterized by their ability to stimulate the release of follicle stimulating hormone (FSH). Thus, a polypeptide of the present invention, alone or in heterodimers with a member of the inhibin family, may be useful as a contraceptive based on the ability of inhibins to decrease fertility in female mammals and decrease spermatogenesis in male mammals. Administration of sufficient amounts of other inhibins can induce infertility in these mammals. Alternatively, the polypeptide of the invention, as a homodimer or as a heterodimer with other protein subunits of the inhibin group, may be useful as a fertility inducing therapeutic, based upon the ability of activin molecules in stimulating FSH release from cells of the anterior pituitary. See, for example, U.S. Pat. No. 4,798,885. A polypeptide of the invention may also be useful for advancement of the onset of fertility in sexually immature mammals, so as to increase the lifetime reproductive performance of domestic animals such as, but not limited to, cows, sheep and pigs.

[0199] The activity of a polypeptide of the invention may, among other means, be measured by the following methods.

[0200] Assays for activin/inhibin activity include, without limitation, those described in: Vale et al., Endocrinology 91:562-572, 1972; Ling et al., Nature 321:779-782, 1986; Vale et al., Nature 321:776-779, 1986; Mason et al., Nature 318:659-663, 1985; Forage et al., Proc. Natl. Acad. Sci. USA 83:3091-3095, 1986.

### 4.10.9 Chemotactic/Chemokinetic Activity

[0201] A polypeptide of the present invention may be involved in chemotactic or chemokinetic activity for mammalian cells, including, for example, monocytes, fibroblasts, neutrophils, T-cells, mast cells, eosinophils, epithelial and/or endothelial cells. A polynucleotide of the invention can encode a polypeptide exhibiting such attributes. Chemotactic and chemokinetic receptor activation can be used to mobilize or attract a desired cell population to a desired site of action. Chemotactic or chemokinetic compositions (e.g. proteins, antibodies, binding partners, or modulators of the invention) provide particular advantages in treatment of wounds and other trauma to tissues, as well as in treatment of localized infections. For example, attraction of lymphocytes, monocytes or neutrophils to tumors or sites of infection may result in improved immune responses against the tumor or infecting agent.

[0202] A protein or peptide has chemotactic activity for a particular cell population if it can stimulate, directly or indirectly, the directed orientation or movement of such cell population. Preferably, the protein or peptide has the ability to directly stimulate directed movement of cells. Whether a particular protein has chemotactic activity for a population of cells can be readily determined by employing such protein or peptide in any known assay for cell chemotaxis.

[0203] Therapeutic compositions of the invention can be used in the following:

[0204] Assays for chemotactic activity (which will identify proteins that induce or prevent chemotaxis) consist of assays that measure the ability of a protein to induce the migration of cells across a membrane as well as the ability of a protein to induce the adhesion of one cell population to another cell population. Suitable assays for movement and adhesion include, without limitation, those described in: Current Protocols in Immunology, Ed by J. E. Coligan, A. M. Kruisbeek, D. H. Marguiles, E. M. Shevach, W. Strober, Pub. Greene Publishing Associates and Wiley-Interscience (Chapter 6.12, Measurement of alpha and beta Chemokines 6.12.1-6.12.28; Taub et al. J. Clin. Invest. 95:1370-1376, 1995; Lind et al. APMIS 103:140-146, 1995; Muller et al Eur. J. Immunol. 25:1744-1748; Gruber et al. J. of Immunol. 152:5860-5867, 1994; Johnston et al. J. of Immunol. 153:1762-1768, 1994.

### 4.10.10 Hemostatic and Thrombolytic Activity

[0205] A polypeptide of the invention may also be involved in hemostasis or thrombolysis or thrombosis. A polynucleotide of the invention can encode a polypeptide exhibiting such attributes. Compositions may be useful in treatment of various coagulation disorders (including hereditary disorders, such as hemophilias) or to enhance coagulation and other hemostatic events in treating wounds resulting from trauma, surgery or other causes. A composition of the invention may also be useful for dissolving or inhibiting formation of thromboses and for treatment and prevention of conditions resulting therefrom (such as, for example, infarction of cardiac and central nervous system vessels (e.g., stroke).

[0206] Therapeutic compositions of the invention can be used in the following:

[0207] Assay for hemostatic and thrombolytic activity include, without limitation, those described in: Linet et al., J. Clin. Pharmacol. 26:131-140, 1986; Burdick et al., Thrombosis Res. 45:413-419, 1987; Humphrey et al., Fibrinolysis 5:71-79 (1991); Schaub, Prostaglandins 35:467-474, 1988.

### 4.10.11 Cancer Diagnosis and Therapy

[0208] Polypeptides of the invention may be involved in cancer cell generation, proliferation or metastasis. Detection of the presence or amount of polynucleotides or polypeptides of the invention may be useful for the diagnosis and/or prognosis of one or more types of cancer. For example, the presence or increased expression of a polynucleotide/polypeptide of the invention may indicate a hereditary risk of cancer, a precancerous condition, or an ongoing malignancy. Conversely, a defect in the gene or absence of the polypeptide may be associated with a cancer condition. Identification of single nucleotide polymorphisms associated with cancer or a predisposition to cancer may also be useful for diagnosis or prognosis.

[0209] Cancer treatments promote tumor regression by inhibiting tumor cell proliferation, inhibiting angiogenesis (growth of new blood vessels that is necessary to support tumor growth) and/or prohibiting metastasis by reducing tumor cell motility or invasiveness. Therapeutic compositions of the invention may be effective in adult and pediatric oncology including in solid phase tumors/malignancies, locally advanced tumors, human soft tissue sarcomas, metastatic cancer, including lymphatic metastases, blood cell malignancies including multiple myeloma, acute and chronic leukemias, and lymphomas, head and neck cancers including mouth cancer, larynx cancer and thyroid cancer, lung cancers including small cell carcinoma and non-small cell cancers, breast cancers including small cell carcinoma and ductal carcinoma, gastrointestinal cancers including esophageal cancer, stomach cancer, colon cancer, colorectal cancer and polyps associated with colorectal neoplasia, pancreatic cancers, liver cancer, urologic cancers including bladder cancer and prostate cancer, malignancies of the female genital tract including ovarian carcinoma, uterine (including endometrial) cancers, and solid tumor in the ovarian follicle, kidney cancers including renal cell carcinoma, brain cancers including intrinsic brain tumors, neuroblastoma, astrocytic brain tumors, gliomas, metastatic tumor cell invasion in the central nervous system, bone cancers including osteomas, skin cancers including malignant melanoma, tumor progression of human skin keratinocytes, squamous cell carcinoma, basal cell carcinoma, hemangiopericytoma and Karposi's sarcoma.

[0210] Polypeptides, polynucleotides, or modulators of polypeptides of the invention (including inhibitors and stimulators of the biological activity of the polypeptide of the invention) may be administered to treat cancer. Therapeutic compositions can be administered in therapeutically effective dosages alone or in combination with adjuvant cancer therapy such as surgery, chemotherapy, radiotherapy, thermotherapy, and laser therapy, and may provide a beneficial effect, e.g. reducing tumor size, slowing rate of tumor growth, inhibiting metastasis, or otherwise improving overall clinical condition, without necessarily eradicating the cancer.

[0211] The composition can also be administered in therapeutically effective amounts as a portion of an anti-cancer cocktail. An anti-cancer cocktail is a mixture of the polypeptide or modulator of the invention with one or more anti-cancer drugs in addition to a pharmaceutically acceptable carrier for delivery. The use of anti-cancer cocktails as a cancer treatment is routine. Anti-cancer drugs that are well known in the art and can be used as a treatment in combination with the polypeptide or modulator of the invention include: Actinomycin D, Aminoglutethimide, Asparaginase, Bleomycin, Busulfan, Carboplatin, Carmustine, Chlorambucil, Cisplatin (cis-DDP), Cyclophosphamide, Cytarabine HCl (Cytosine arabinoside), Dacarbazine, Dactinomycin, Daunorubicin HCl, Doxorubicin HCl, Estramustine phosphate sodium, Etoposide (V16-213), Floxuridine, 5-Fluorouracil (5-Fu), Flutamide, Hydroxyurea (hydroxycarbamide), Ifosfamide, Interferon Alpha-2a, Interferon Alpha-2b, Leuprolide acetate (LHRH-releasing factor analog), Lomustine, Mechlorethamine HCl (nitrogen mustard), Melphalan, Mercaptopurine, Mesna, Methotrexate (MIX), Mitomycin, Mitoxantrone HCl, Octreotide, Plicamycin, Procarbazine HCl, Streptozocin, Tamoxifen citrate, Thioguanine, Thiotepa, Vinblastine sulfate, Vincristine sulfate, Amsacrine, Azacitidine, Hexamethylmelamine, Interleukin-2, Mitoguazone, Pentostatin, Semustine, Teniposide, and Vindesine sulfate.

[0212] In addition, therapeutic compositions of the invention may be used for prophylactic treatment of cancer. There are hereditary conditions and/or environmental situations (e.g. exposure to carcinogens) known in the art that predispose an individual to developing cancers. Under these circumstances, it may be beneficial to treat these individuals with therapeutically effective doses of the polypeptide of the invention to reduce the risk of developing cancers.

[0213] In vitro models can be used to determine the effective doses of the polypeptide of the invention as a potential cancer treatment. These in vitro models include proliferation assays of cultured tumor cells, growth of cultured tumor cells in soft agar (see Freshney, (1987) Culture of Animal Cells: A Manual of Basic Technique, Wily-Liss, New York, N.Y. Ch 18 and Ch 21), tumor systems in nude mice as described in Giovanella et al., J. Natl. Can. Inst., 52: 921-30 (1974), mobility and invasive potential of tumor cells in Boyden Chamber assays as described in Pilkington et al., Anticancer Res., 17: 4107-9 (1997), and angiogenesis assays such as induction of vascularization of the chick chorioallantoic membrane or induction of vascular endothelial cell migration as described in Ribatta et al., Intl. J. Dev. Biol., 40: 1189-97 (1999) and Li et al., Clin. Exp. Metastasis, 17:423-9 (1999), respectively. Suitable tumor cells lines are available, e.g. from American Type Tissue Culture Collection catalogs.

### 4.10.12 Receptor/Ligand Activity

[0214] A polypeptide of the present invention may also demonstrate activity as receptor, receptor ligand or inhibitor or agonist of receptor/ligand interactions. A polynucleotide of the invention can encode a polypeptide exhibiting such characteristics. Examples of such receptors and ligands include, without limitation, cytokine receptors and their ligands, receptor kinases and their ligands, receptor phosphatases and their ligands, receptors involved in cell-cell interactions and their ligands (including without limitation, cellular adhesion molecules (such as selecting, integrins and their ligands) and receptor/ligand pairs involved in antigen presentation, antigen recognition and development of cellular and humoral immune responses. Receptors and ligands are also useful for screening of potential peptide or small molecule inhibitors of the relevant receptor/ligand interaction. A protein of the present invention (including, without limitation, fragments of receptors and ligands) may themselves be useful as inhibitors of receptor/ligand interactions.

[0215] The activity of a polypeptide of the invention may, among other means, be measured by the following methods:

[0216] Suitable assays for receptor-ligand activity include without limitation those described in: Current Protocols in Immunology, Ed by J. E. Coligan, A. M. Kruisbeek, D. H. Margulies, E. M. Shevach, W. Strober, Pub. Greene Publishing Associates and Wiley-Interscience (Chapter 7.28, Measurement of Cellular Adhesion under static conditions 7.28.1-7.28.22), Takai et al., Proc. Natl. Acad. Sci. USA 84:6864-6868, 1987; Bierer et al., J. Exp. Med. 168:1145-1156, 1988; Rosenstein et al., J. Exp. Med. 169:149-160 1989; Stoltenborg et al., J. Immunol. Methods 175:59-68, 1994; Stitt et al., Cell 80:661-670, 1995.

[0217] By way of example, the polypeptides of the invention may be used as a receptor for a ligand(s) thereby transmitting the biological activity of that ligand(s). Ligands may be identified through binding assays, affinity chromatography, dihybrid screening assays, BIAcore assays, gel overlay assays, or other methods known in the art.

[0218] Studies characterizing drugs or proteins as agonist or antagonist or partial agonists or a partial antagonist require the use of other proteins as competing ligands. The polypeptides of the present invention or ligand(s) thereof may be labeled by being coupled to radioisotopes, colorimetric molecules or a toxin molecules by conventional methods. (“Guide to Protein Purification” Murray P. Deutscher (ed) Methods in Enzymology Vol. 182 (1990) Academic Press, Inc. San Diego). Examples of radioisotopes include, but are not limited to, tritium and carbon-14 . Examples of calorimetric molecules include, but are not limited to, fluorescent molecules such as fluorescamine, or rhodamine or other calorimetric molecules. Examples of toxins include, but are not limited, to ricin.

### 4.10.13 Drug Screening

[0219] This invention is particularly useful for screening chemical compounds by using the novel polypeptides or binding fragments thereof in any of a variety of drug screening techniques. The polypeptides or fragments employed in such a test may either be free in solution, affixed to a solid support, borne on a cell surface or located intracellularly. One method of drug screening utilizes eukaryotic or prokaryotic host cells which are stably transformed with recombinant nucleic acids expressing the polypeptide or a fragment thereof. Drugs are screened against such transformed cells in competitive binding assays. Such cells, either in viable or fixed form, can be used for standard binding assays. One may measure, for example, the formation of complexes between polypeptides of the invention or fragments and the agent being tested or examine the diminution in complex formation between the novel polypeptides and an appropriate cell line, which are well known in the art.

[0220] Sources for test compounds that may be screened for ability to bind to or modulate (i.e., increase or decrease) the activity of polypeptides of the invention include (1) inorganic and organic chemical libraries, (2) natural product libraries, and (3) combinatorial libraries comprised of either random or mimetic peptides, oligonucleotides or organic molecules.

[0221] Chemical libraries may be readily synthesized or purchased from a number of commercial sources, and may include structural analogs of known compounds or compounds that are identified as “hits” or “leads” via natural product screening.

[0222] The sources of natural product libraries are microorganisms (including bacteria and fungi), animals, plants or other vegetation, or marine organisms, and libraries of mixtures for screening may be created by: (1) fermentation and extraction of broths from soil, plant or marine microorganisms or (2) extraction of the organisms themselves. Natural product libraries include polyketides, non-ribosomal peptides, and (non-naturally occurring) variants thereof. For a review, see Science 282:63-68 (1998).

[0223] Combinatorial libraries are composed of large numbers of peptides, oligonucleotides or organic compounds and can be readily prepared by traditional automated synthesis methods, PCR, cloning or proprietary synthetic methods. Of particular interest are peptide and oligonucleotide combinatorial libraries. Still other libraries of interest include peptide, protein, peptidomimetic, multiparallel synthetic collection, recombinatorial, and polypeptide libraries. For a review of combinatorial chemistry and libraries created therefrom, see Myers, Curr. Opin. Biotechnol. 8:701-707 (1997). For reviews and examples of peptidomimetic libraries, see Al-Obeidi et al., Mol. Biotechnol, 9(3):205-23 (1998); Hruby et al., Curr Opin Chem Biol, 1(1): 114-19 (1997); Dorner et al., Bioorg Med Chem, 4(5):709-15 (1996) (alkylated dipeptides).

[0224] Identification of modulators through use of the various libraries described herein permits modification of the candidate “hit” (or “lead”) to optimize the capacity of the “hit” to bind a polypeptide of the invention. The molecules identified in the binding assay are then tested for antagonist or agonist activity in in vivo tissue culture or animal models that are well known in the art. In brief, the molecules are titrated into a plurality of cell cultures or animals and then tested for either cell/animal death or prolonged survival of the animal/cells.

[0225] The binding molecules thus identified may be complexed with toxins, e.g., ricin or cholera, or with other compounds that are toxic to cells such as radioisotopes. The toxin-binding molecule complex is then targeted to a tumor or other cell by the specificity of the binding molecule for a polypeptide of the invention. Alternatively, the binding molecules may be complexed with imaging agents for targeting and imaging purposes.

### 4.10.14 Assay for Receptor Activity

[0226] The invention also provides methods to detect specific binding of a polypeptide e.g. a ligand or a receptor. The art provides numerous assays particularly useful for identifying previously unknown binding partners for receptor polypeptides of the invention. For example, expression cloning using mammalian or bacterial cells, or dihybrid screening assays can be used to identify polynucleotides encoding binding partners. As another example, affinity chromatography with the appropriate immobilized polypeptide of the invention can be used to isolate polypeptides that recognize and bind polypeptides of the invention. There are a number of different libraries used for the identification of compounds, and in particular small molecules, that modulate (i.e., increase or decrease) biological activity of a polypeptide of the invention. Ligands for receptor polypeptides of the invention can also be identified by adding exogenous ligands, or cocktails of ligands to two cells populations that are genetically identical except for the expression of the receptor of the invention: one cell population expresses the receptor of the invention whereas the other does not. The response of the two cell populations to the addition of ligands(s) are then compared. Alternatively, an expression library can be co-expressed with the polypeptide of the invention in cells and assayed for an autocrine response to identify potential ligand(s). As still another example, BIAcore assays, gel overlay assays, or other methods known in the art can be used to identify binding partner polypeptides, including, (1) organic and inorganic chemical libraries, (2) natural product libraries, and (3) combinatorial libraries comprised of random peptides, oligonucleotides or organic molecules.

[0227] The role of downstream intracellular signaling molecules in the signaling cascade of the polypeptide of the invention can be determined. For example, a chimeric protein in which the cytoplasmic domain of the polypeptide of the invention is fused to the extracellular portion of a protein, whose ligand has been identified, is produced in a host cell. The cell is then incubated with the ligand specific for the extracellular portion of the chimeric protein, thereby activating the chimeric receptor. Known downstream proteins involved in intracellular signaling can then be assayed for expected modifications i.e. phosphorylation. Other methods known to those in the art can also be used to identify signaling molecules involved in receptor activity.

### 4.10.15 Anti-Inflammatory Activity

[0228] Compositions of the present invention may also exhibit anti-inflammatory activity. The anti-inflammatory activity may be achieved by providing a stimulus to cells involved in the inflammatory response, by inhibiting or promoting cell-cell interactions (such as, for example, cell adhesion), by inhibiting or promoting chemotaxis of cells involved in the inflammatory process, inhibiting or promoting cell extravasation, or by stimulating or suppressing production of other factors which more directly inhibit or promote an inflammatory response. Compositions with such activities can be used to treat inflammatory conditions including chronic or acute conditions), including without limitation intimation associated with infection (such as septic shock, sepsis or systemic inflammatory response syndrome (SIRS)), ischemia-reperfusion injury, endotoxin lethality, arthritis, complement-mediated hyperacute rejection, nephritis, cytokine or chemokine-induced lung injury, inflammatory bowel disease, Crohn's disease or resulting from over production of cytokines such as TNF or IL-1. Compositions of the invention may also be useful to treat anaphylaxis and hypersensitivity to an antigenic substance or material. Compositions of this invention may be utilized to prevent or treat conditions such as, but not limited to, sepsis, acute pancreatitis, endotoxin shock, cytokine induced shock, rheumatoid arthritis, chronic inflammatory arthritis, pancreatic cell damage from diabetes mellitus type 1, graft versus host disease, inflammatory bowel disease, inflammation associated with pulmonary disease, other autoimmune disease or inflammatory disease, an antiproliferative agent such as for acute or chronic mylegenous leukemia or in the prevention of premature labor secondary to intrauterine infections.

### 4.10.16 Leukemias

[0229] Leukemias and related disorders may be treated or prevented by administration of a therapeutic that promotes or inhibits function of the polynucleotides and/or polypeptides of the invention. Such leukemias and related disorders include but are not limited to acute leukemia, acute lymphocytic leukemia, acute myelocytic leukemia, myeloblastic, promyelocytic, myelomonocytic, monocytic, erythroleukemia, chronic leukemia, chronic myelocytic (granulocytic) leukemia and chronic lymphocytic leukemia (for a review of such disorders, see Fishman et al., 1985, Medicine, 2d Ed., J.B. Lippincott Co., Philadelphia).

### 4.10.17 Nervous System Disorders

[0230] Nervous system disorders, involving cell types which can be tested for efficacy of intervention with compounds that modulate the activity of the polynucleotides and/or polypeptides of the invention, and which can be treated upon thus observing an indication of therapeutic utility, include but are not limited to nervous system injuries, and diseases or disorders which result in either a disconnection of axons, a diminution or degeneration of neurons, or demyelination. Nervous system lesions which may be treated in a patient (including human and non-human mammalian patients) according to the invention include but are not limited to the following lesions of either the central (including spinal cord, brain) or peripheral nervous systems:

[0231] (i) traumatic lesions, including lesions caused by physical injury or associated with surgery, for example, lesions which sever a portion of the nervous system, or compression injuries;

[0232] (ii) ischemic lesions, in which a lack of oxygen in a portion of the nervous system results in neuronal injury or death, including cerebral infarction or ischemia, or spinal cord infarction or ischemia;

[0233] (iii) infectious lesions, in which a portion of the nervous system is destroyed or injured as a result of infection, for example, by an abscess or associated with infection by human immunodeficiency virus, herpes zoster, or herpes simplex virus or with Lyme disease, tuberculosis, syphilis;

[0234] (iv) degenerative lesions, in which a portion of the nervous system is destroyed or injured as a result of a degenerative process including but not limited to degeneration associated with Parkinson's disease, Alzheimer's disease, Huntington's chorea, or amyotrophic lateral sclerosis;

[0235] (v) lesions associated with nutritional diseases or disorders, in which a portion of the nervous system is destroyed or injured by a nutritional disorder or disorder of metabolism including but not limited to, vitamin B12 deficiency, folic acid deficiency, Wernicke disease, tobacco-alcohol amblyopia, Marchiafava-Bignami disease primary degeneration of the corpus callosum), and alcoholic cerebellar degeneration;

[0236] (vi) neurological lesions associated with systemic diseases including but not limited to diabetes (diabetic neuropathy, Bell's palsy), systemic lupus erythematosus, carcinoma, or sarcoidosis;

[0237] (vii) lesions caused by toxic substances including alcohol, lead, or particular neurotoxins; and

[0238] (viii) demyelinated lesions in which a portion of the nervous system is destroyed or injured by a demyelinating disease including but not limited to multiple sclerosis, human immunodeficiency virus-associated myelopathy, transverse myelopathy or various etiologies, progressive multifocal leukoencephalopathy, and central pontine myelinolysis.

[0239] Therapeutics which are useful according to the invention for treatment of a nervous system disorder may be selected by testing for biological activity in promoting the survival or differentiation of neurons. For example, and not by way of limitation, therapeutics which elicit any of the following effects may be useful according to the invention:

[0240] (i) increased survival time of neurons in culture;

[0241] (ii) increased sprouting of neurons in culture or in vivo;

[0242] (iii) increased production of a neuron-associated molecule in culture or in vivo, e.g., choline acetyltransferase or acetylcholinesterase with respect to motor neurons; or (iv) decreased symptoms of neuron dysfunction in vivo.

[0243] Such effects may be measured by any method known in the art. In preferred, non-limiting embodiments, increased survival of neurons may be measured by the method set forth in Arakawa et al. (1990, J. Neurosci. 10:3507-3515); increased sprouting of neurons may be detected by methods set forth in Pestronk et al. (1980, Exp. Neurol. 70:65-82) or Brown et al. (1981, Ann. Rev. Neurosci. 4:17-42); increased production of neuron-associated molecules may be measured by bioassay, enzymatic assay, antibody binding, Northern blot assay, etc., depending on the molecule to be measured; and motor neuron dysfunction may be measured by assessing the physical manifestation of motor neuron disorder, e.g., weakness, motor neuron conduction velocity, or functional disability.

[0244] In specific embodiments, motor neuron disorders that may be treated according to the invention include but are not limited to disorders such as infarction, infection, exposure to toxin, trauma, surgical damage, degenerative disease or malignancy that may affect motor neurons as well as other components of the nervous system, as well as disorders that selectively affect neurons such as amyotrophic lateral sclerosis, and including but not limited to progressive spinal muscular atrophy, progressive bulbar palsy, primary lateral sclerosis, infantile and juvenile muscular atrophy, progressive bulbar paralysis of childhood (Fazio-Londe syndrome), poliomyelitis and the post polio syndrome, and Hereditary Motorsensory Neuropathy (Charcot-Marie-Tooth Disease).

### 4.10.18 Other Activities

[0245] A polypeptide of the invention may also exhibit one or more of the following additional activities or effects: inhibiting the growth, infection or function of, or killing, infectious agents, including, without limitation, bacteria, viruses, fungi and other parasites; effecting (suppressing or enhancing) bodily characteristics, including, without limitation, height, weight, hair color, eye color, skin, fat to lean ratio or other tissue pigmentation, or organ or body part size or shape (such as, for example, breast augmentation or diminution, change in bone form or shape); effecting biorhythms or circadian cycles or rhythms; effecting the fertility of male or female subjects; effecting the metabolism, catabolism, anabolism, processing, utilization, storage or elimination of dietary fat, lipid, protein, carbohydrate, vitamins, minerals, co-factors or other nutritional factors or component(s); effecting behavioral characteristics, including, without limitation, appetite, libido, stress, cognition (including cognitive disorders), depression (including depressive disorders) and violent behaviors; providing analgesic effects or other pain reducing effects; promoting differentiation and growth of embryonic stem cells in lineages other than hematopoietic lineages; hormonal or endocrine activity; in the case of enzymes, correcting deficiencies of the enzyme and treating deficiency-related diseases; treatment of hyperproliferative disorders (such as, for example, psoriasis); immunoglobulin-like activity (such as, for example, the ability to bind antigens or complement); and the ability to act as an antigen in a vaccine composition to raise an immune response against such protein or another material or entity which is cross-reactive with such protein.

### 4.10.19 Identification of Polymorphisms

[0246] The demonstration of polymorphisms makes possible the identification of such polymorphisms in human subjects and the pharmacogenetic use of this information for diagnosis and treatment. Such polymorphisms may be associated with, e.g., differential predisposition or susceptibility to various disease states (such as disorders involving inflammation or immune response) or a differential response to drug administration, and this genetic information can be used to tailor preventive or therapeutic treatment appropriately. For example, the existence of a polymorphism associated with a predisposition to inflammation or autoimmune disease makes possible the diagnosis of this condition in humans by identifying the presence of the polymorphism.

[0247] Polymorphisms can be identified in a variety of ways known in the art which all generally involve obtaining a sample from a patient, analyzing DNA from the sample, optionally involving isolation or amplification of the DNA, and identifying the presence of the polymorphism in the DNA. For example, PCR may be used to amplify an appropriate fragment of genomic DNA which may then be sequenced. Alternatively, the DNA may be subjected to allele-specific oligonucleotide hybridization (in which appropriate oligonucleotides are hybridized to the DNA under conditions permitting detection of a single base mismatch) or to a single nucleotide extension assay (in which an oligonucleotide that hybridizes immediately adjacent to the position of the polymorphism is extended with one or more labeled nucleotides). In addition, traditional restriction fragment length polymorphism analysis (using restriction enzymes that provide differential digestion of the genomic DNA depending on the presence or absence of the polymorphism) may be performed. Arrays with nucleotide sequences of the present invention can be used to detect polymorphisms. The array can comprise modified nucleotide sequences of the present invention in order to detect the nucleotide sequences of the present invention. In the alternative, any one of the nucleotide sequences of the present invention can be placed on the array to detect changes from those sequences.

[0248] Alternatively a polymorphism resulting in a change in the amino acid sequence could also be detected by detecting a corresponding change in amino acid sequence of the protein, e.g., by an antibody specific to the variant sequence.

### 4.10.20 Arthritis and Inflammation

[0249] The immunosuppressive effects of the compositions of the invention against rheumatoid arthritis is determined in an experimental animal model system. The experimental model system is adjuvant induced arthritis in rats, and the protocol is described by J. Holoshitz, et at., 1983, Science, 219:56, or by B. Waksman et al., 1963, Int. Arch. Allergy Appl. Immunol., 23:129. Induction of the disease can be caused by a single injection, generally intradermally, of a suspension of killed Mycobacterium tuberculosis in complete Freund's adjuvant (CFA). The route of injection can vary, but rats may be injected at the base of the tail with an adjuvant mixture. The polypeptide is administered in phosphate buffered solution (PBS) at a dose of about 1-5 mg/kg. The control consists of administering PBS only.

[0250] The procedure for testing the effects of the test compound would consist of intradermally injecting killed Mycobacterium tuberculosis in CFA followed by immediately administering the test compound and subsequent treatment every other day until day 24. At 14, 15, 18, 20, 22, and 24 days after injection of Mycobacterium CFA, an overall arthritis score may be obtained as described by J. Holoskitz above. An analysis of the data would reveal that the test compound would have a dramatic affect on the swelling of the joints as measured by a decrease of the arthritis score.

### 4.11 Therapeutic Methods

[0251] The compositions (including polypeptide fragments, analogs, variants and antibodies or other binding partners or modulators including antisense polynucleotides) of the invention have numerous applications in a variety of therapeutic methods. Examples of therapeutic applications include, but are not limited to, those exemplified herein.

### 4.11.1 Example

[0252] One embodiment of the invention is the administration of an effective amount of the polypeptides or other composition of the invention to individuals affected by a disease or disorder that can be modulated by regulating the peptides of the invention. While the mode of administration is not particularly important, parenteral administration is preferred. An exemplary mode of administration is to deliver an intravenous bolus. The dosage of the polypeptides or other composition of the invention will normally be determined by the prescribing physician. It is to be expected that the dosage will vary according to the age, weight, condition and response of the individual patient. Typically, the amount of polypeptide administered per dose will be in the range of about 0.01 μg/kg to 100 mg/kg of body weight, with the preferred dose being about 0.1 μg/kg to 10 mg/kg of patient body weight. For parenteral administration, polypeptides of the invention will be formulated in an injectable form combined with a pharmaceutically acceptable parenteral vehicle. Such vehicles are well known in the art and examples include water, saline, Ringer's solution, dextrose solution, and solutions consisting of small amounts of the human serum albumin. The vehicle may contain minor amounts of additives that maintain the isotonicity and stability of the polypeptide or other active ingredient. The preparation of such solutions is within the skill of the art.

### 4.12 Pharmaceutical Formulations and Routes of Administration

[0253] A protein or other composition of the present invention (from whatever source derived, including without limitation from recombinant and non-recombinant sources and including antibodies and other binding partners of the polypeptides of the invention) may be administered to a patient in need, by itself, or in pharmaceutical compositions where it is mixed with suitable carriers or excipient(s) at doses to treat or ameliorate a variety of disorders. Such a composition may optionally contain (in addition to protein or other active ingredient and a carrier) diluents, fillers, salts, buffers, stabilizers, solubilizers, and other materials well known in the art. The term “pharmaceutically acceptable” means a non-toxic material that does not interfere with the effectiveness of the biological activity of the active ingredient(s). The characteristics of the carrier will depend on the route of administration. The pharmaceutical composition of the invention may also contain cytokines, lymphokines, or other hematopoietic factors such as M-CSF, GM-CSF, TNF, IL-1, IL-2, IL-3, IL-4, IL-5, IL-6, IL-7, IL-8, IL-9, IL-10, IL-11, IL-12, IL-13, IL-14, IL-15, IFN, TNF0, TNF1, TNF2, G-CSF, Meg-CSF, thrombopoietin, stem cell factor, and erythropoietin. In further compositions, proteins of the invention may be combined with other agents beneficial to the treatment of the disease or disorder in question. These agents include various growth factors such as epidermal growth factor (EGF), platelet-derived growth factor (PDGF), transforming growth factors (TGF-α and TGF-β), insulin-like growth factor (IGF), as well as cytokines described herein.

[0254] The pharmaceutical composition may further contain other agents which either enhance the activity of the protein or other active ingredient or complement its activity or use in treatment. Such additional factors and/or agents may be included in the pharmaceutical composition to produce a synergistic effect with protein or other active ingredient of the invention, or to minimize side effects. Conversely, protein or other active ingredient of the present invention may be included in formulations of the particular clotting factor, cytokine, lymphokine, other hematopoietic factor, thrombolytic or anti-thrombotic factor, or anti-inflammatory agent to minimize side effects of the clotting factor, cytokine, lymphokine, other hematopoietic factor, thrombolytic or anti-thrombotic factor, or anti-inflammatory agent (such as IL-1Ra, IL-1 Hy1, IL-1 Hy2, anti-TNF, corticosteroids, immunosuppressive agents). A protein of the present invention may be active in multimers (e.g., heterodimers or homodimers) or complexes with itself or other proteins. As a result, pharmaceutical compositions of the invention may comprise a protein of the invention in such multimeric or complexed form.

[0255] As an alternative to being included in a pharmaceutical composition of the invention including a first protein, a second protein or a therapeutic agent may be concurrently administered with the first protein (e.g., at the same time, or at differing times provided that therapeutic concentrations of the combination of agents is achieved at the treatment site). Techniques for formulation and administration of the compounds of the instant application may be found in “Remington's Pharmaceutical Sciences,” Mack Publishing Co., Easton, Pa., latest edition. A therapeutically effective dose further refers to that amount of the compound sufficient to result in amelioration of symptoms, e.g., treatment, healing, prevention or amelioration of the relevant medical condition, or an increase in rate of treatment, healing, prevention or amelioration of such conditions. When applied to an individual active ingredient, administered alone, a therapeutically effective dose refers to that ingredient alone. When applied to a combination, a therapeutically effective dose refers to combined amounts of the active ingredients that result in the therapeutic effect, whether administered in combination, serially or simultaneously.

[0256] In practicing the method of treatment or use of the present invention, a therapeutically effective amount of protein or other active ingredient of the present invention is administered to a mammal having a condition to be treated. Protein or other active ingredient of the present invention may be administered in accordance with the method of the invention either alone or in combination with other therapies such as treatments employing cytokines, lymphokines or other hematopoietic factors. When co-administered with one or more cytokines, lymphokines or other hematopoietic factors, protein or other active ingredient of the present invention may be administered either simultaneously with the cytokine(s), lymphokine(s), other hematopoietic factor(s), thrombolytic or anti-thrombotic factors, or sequentially. If administered sequentially, the attending physician will decide on the appropriate sequence of administering protein or other active ingredient of the present invention in combination with cytokine(s), lymphokine(s), other hematopoietic factor(s), thrombolytic or anti-thrombotic factors.

### 4.12.1 Routes of Administration

[0257] Suitable routes of administration may, for example, include oral, rectal, transmucosal, or intestinal administration; parenteral delivery, including intramuscular, subcutaneous, intramedullary injections, as well as intrathecal, direct intraventricular, intravenous, intraperitoneal, intranasal, or intraocular injections. Administration of protein or other active ingredient of the present invention used in the pharmaceutical composition or to practice the method of the present invention can be carried out in a variety of conventional ways, such as oral ingestion, inhalation, topical application or cutaneous, subcutaneous, intraperitoneal, parenteral or intravenous injection. Intravenous administration to the patient is preferred.

[0258] Alternately, one may administer the compound in a local rather than systemic manner, for example, via injection of the compound directly into a arthritic joints or in fibrotic tissue, often in a depot or sustained release formulation. In order to prevent the scarring process frequently occurring as complication of glaucoma surgery, the compounds may be administered topically, for example, as eye drops. Furthermore, one may administer the drug in a targeted drug delivery system, for example, in a liposome coated with a specific antibody, targeting, for example, arthritic or fibrotic tissue. The liposomes will be targeted to and taken up selectively by the afflicted tissue.

[0259] The polypeptides of the invention are administered by any route that delivers an effective dosage to the desired site of action. The determination of a suitable route of administration and an effective dosage for a particular indication is within the level of skill in the art. Preferably for wound treatment, one administers the therapeutic compound directly to the site. Suitable dosage ranges for the polypeptides of the invention can be extrapolated from these dosages or from similar studies in appropriate animal models. Dosages can then be adjusted as necessary by the clinician to provide maximal therapeutic benefit.

### 4.12.2 Compositions/Formulations

[0260] Pharmaceutical compositions for use in accordance with the present invention thus may be formulated in a conventional manner using one or more physiologically acceptable carriers comprising excipients and auxiliaries which facilitate processing of the active compounds into preparations which can be used pharmaceutically. These pharmaceutical compositions may be manufactured in a manner that is itself known, e.g., by means of conventional mixing, dissolving, granulating, dragee-making, levigating, emulsifing, encapsulating, entrapping or lyophilizing processes. Proper formulation is dependent upon the route of administration chosen. When a therapeutically effective amount of protein or other active ingredient of the present invention is administered orally, protein or other active ingredient of the present invention will be in the form of a tablet, capsule, powder, solution or elixir. When administered in tablet form, the pharmaceutical composition of the invention may additionally contain a solid carrier such as a gelatin or an adjuvant. The tablet, capsule, and powder contain from about 5 to 95% protein or other active ingredient of the present invention, and preferably from about 25 to 90% protein or other active ingredient of the present invention. When administered in liquid form, a liquid carrier such as water, petroleum, oils of animal or plant origin such as peanut oil, mineral oil, soybean oil, or sesame oil, or synthetic oils may be added. The liquid form of the pharmaceutical composition may further contain physiological saline solution, dextrose or other saccharide solution, or glycols such as ethylene glycol, propylene glycol or polyethylene glycol. When administered in liquid form, the pharmaceutical composition contains from about 0.5 to 90% by weight of protein or other active ingredient of the present invention, and preferably from about 1 to 50% protein or other active ingredient of the present invention.

[0261] When a therapeutically effective amount of protein or other active ingredient of the present invention is administered by intravenous, cutaneous or subcutaneous injection, protein or other active ingredient of the present invention will be in the form of a pyrogen-free, parenterally acceptable aqueous solution. The preparation of such parenterally acceptable protein or other active ingredient solutions, having due regard to pH, isotonicity, stability, and the like, is within the skill in the art. A preferred pharmaceutical composition for intravenous, cutaneous, or subcutaneous injection should contain, in addition to protein or other active ingredient of the present invention, an isotonic vehicle such as Sodium Chloride Injection, Ringer's Injection, Dextrose Injection, Dextrose and Sodium Chloride Injection, Lactated Ringer's Injection, or other vehicle as known in the art. The pharmaceutical composition of the present invention may also contain stabilizers, preservatives, buffers, antioxidants, or other additives known to those of skill in the art. For injection, the agents of the invention may be formulated in aqueous solutions, preferably in physiologically compatible buffers such as Hanks's solution, Ringer's solution, or physiological saline buffer. For transmucosal administration, penetrants appropriate to the barrier to be permeated are used in the formulation. Such penetrants are generally known in the art.

[0262] For oral administration, the compounds can be formulated readily by combining the active compounds with pharmaceutically acceptable carriers well known in the art. Such carriers enable the compounds of the invention to be formulated as tablets, pills, dragees, capsules, liquids, gels, syrups, slurries, suspensions and the like, for oral ingestion by a patient to be treated. Pharmaceutical preparations for oral use can be obtained from a solid excipient, optionally grinding a resulting mixture, and processing the mixture of granules, after adding suitable auxiliaries, if desired, to obtain tablets or dragee cores. Suitable excipients are, in particular, fillers such as sugars, including lactose, sucrose, mannitol, or sorbitol; cellulose preparations such as, for example, maize starch, wheat starch, rice starch, potato starch, gelatin, gum tragacanth, methyl cellulose, hydroxypropylmethyl-cellulose, sodium carboxymethylcellulose, and/or polyvinylpyrrolidone (PVP). If desired, disintegrating agents may be added, such as the cross-linked polyvinyl pyrrolidone, agar, or alginic acid or a salt thereof such as sodium alginate. Dragee cores are provided with suitable coatings. For this purpose, concentrated sugar solutions may be used, which may optionally contain gum arabic, talc, polyvinyl pyrrolidone, carbopol gel, polyethylene glycol, and/or titanium dioxide, lacquer solutions, and suitable organic solvents or solvent mixtures. Dyestuffs or pigments may be added to the tablets or dragee coatings for identification or to characterize different combinations of active compound doses.

[0263] Pharmaceutical preparations which can be used orally include push-fit capsules made of gelatin, as well as soft, sealed capsules made of gelatin and a plasticizer, such as glycerol or sorbitol. The push-fit capsules can contain the active ingredients in admixture with filler such as lactose, binders such as starches, and/or lubricants such as talc or magnesium stearate and, optionally, stabilizers. In soft capsules, the active compounds may be dissolved or suspended in suitable liquids, such as fatty oils, liquid paraffin, or liquid polyethylene glycols. In addition, stabilizers may be added. All formulations for oral administration should be in dosages suitable for such administration. For buccal administration, the compositions may take the form of tablets or lozenges formulated in conventional manner.

[0264] For administration by inhalation, the compounds for use according to the present invention are conveniently delivered in the form of an aerosol spray presentation from pressurized packs or a nebuliser, with the use of a suitable propellant, e.g., dichlorodifluoromethane, trichlorofluoromethane, dichlorotetrarluoroethane, carbon dioxide or other suitable gas. In the case of a pressurized aerosol the dosage unit may be determined by providing a valve to deliver a metered amount. Capsules and cartridges of, e.g., gelatin for use in an inhaler or insufflator may be formulated containing a powder mix of the compound and a suitable powder base such as lactose or starch. The compounds may be formulated for parenteral administration by injection, e.g., by bolus injection or continuous infusion. Formulations for injection may be presented in unit dosage form, e.g., in ampules or in multi-dose containers, with an added preservative. The compositions may take such forms as suspensions, solutions or emulsions in oily or aqueous vehicles, and may contain formulatory agents such as suspending, stabilizing and/or dispersing agents.

[0265] Pharmaceutical formulations for parenteral administration include aqueous solutions of the active compounds in water-soluble form. Additionally, suspensions of the active compounds may be prepared as appropriate oily injection suspensions. Suitable lipophilic solvents or vehicles include fatty oils such as sesame oil, or synthetic fatty acid esters, such as ethyl oleate or triglycerides, or liposomes. Aqueous injection suspensions may contain substances which increase the viscosity of the suspension, such as sodium carboxymethyl cellulose, sorbitol, or dextran. Optionally, the suspension may also contain suitable stabilizers or agents which increase the solubility of the compounds to allow for the preparation of highly concentrated solutions. Alternatively, the active ingredient may be in powder form for constitution with a suitable vehicle, e.g., sterile pyrogen-free water, before use.

[0266] The compounds may also be formulated in rectal compositions such as suppositories or retention enemas, e.g., containing conventional suppository bases such as cocoa butter or other glycerides. In addition to the formulations described previously, the compounds may also be formulated as a depot preparation. Such long acting formulations may be administered by implantation (for example subcutaneously or intramuscularly) or by intramuscular injection. Thus, for example, the compounds may be formulated with suitable polymeric or hydrophobic materials (for example as an emulsion in an acceptable oil) or ion exchange resins, or as sparingly soluble derivatives, for example, as a sparingly soluble salt.

[0267] A pharmaceutical carrier for the hydrophobic compounds of the invention is a co-solvent system comprising benzyl alcohol, a nonpolar surfactant, a water-miscible organic polymer, and an aqueous phase. The co-solvent system may be the VPD co-solvent system. VPD is a solution of 3% w/v benzyl alcohol, 8% w/v of the nonpolar surfactant polysorbate 80, and 65% w/v polyethylene glycol 300, made up to volume in absolute ethanol. The VPD co-solvent system (VPD:5 W) consists of VPD diluted 1:1 with a 5% dextrose in water solution. This co-solvent system dissolves hydrophobic compounds well, and itself produces low toxicity upon systemic administration. Naturally, the proportions of a co-solvent system may be varied considerably without destroying its solubility and toxicity characteristics. Furthermore, the identity of the co-solvent components may be varied: for example, other low-toxicity nonpolar surfactants may be used instead of polysorbate 80; the fraction size of polyethylene glycol may be varied; other biocompatible polymers may replace polyethylene glycol, e.g. polyvinyl pyrrolidone; and other sugars or polysaccharides may substitute for dextrose. Alternatively, other delivery systems for hydrophobic pharmaceutical compounds may be employed. Liposomes and emulsions are well known examples of delivery vehicles or carriers for hydrophobic drugs. Certain organic solvents such as dimethylsulfoxide also may be employed, although usually at the cost of greater toxicity. Additionally, the compounds may be delivered using a sustained-release system, such as semipermeable matrices of solid hydrophobic polymers containing the therapeutic agent. Various types of sustained-release materials have been established and are well known by those skilled in the art. Sustained-release capsules may, depending on their chemical nature, release the compounds for a few weeks up to over 100 days. Depending on the chemical nature and the biological stability of the therapeutic reagent, additional strategies for protein or other active ingredient stabilization may be employed.

[0268] The pharmaceutical compositions also may comprise suitable solid or gel phase carriers or excipients. Examples of such carriers or excipients include but are not limited to calcium carbonate, calcium phosphate, various sugars, starches, cellulose derivatives, gelatin, and polymers such as polyethylene glycols. Many of the active ingredients of the invention may be provided as salts with pharmaceutically compatible counter ions. Such pharmaceutically acceptable base addition salts are those salts which retain the biological effectiveness and properties of the free acids and which are obtained by reaction with inorganic or organic bases such as sodium hydroxide, magnesium hydroxide, ammonia, trialkylamine, dialkylamine, monoalkylamine, dibasic amino acids, sodium acetate, potassium benzoate, triethanol amine and the like.

[0269] The pharmaceutical composition of the invention may be in the form of a complex of the protein(s) or other active ingredient(s) of present invention along with protein or peptide antigens. The protein and/or peptide antigen will deliver a stimulatory signal to both B and T lymphocytes. B lymphocytes will respond to antigen through their surface immunoglobulin receptor. T lymphocytes will respond to antigen through the T cell receptor (TCR) following presentation of the antigen by MHC proteins. MHC and structurally related proteins including those encoded by class I and class II MHC genes on host cells will serve to present the peptide antigen(s) to T lymphocytes. The antigen components could also be supplied as purified MHC-peptide complexes alone or with co-stimulatory molecules that can directly signal T cells. Alternatively antibodies able to bind surface immunoglobulin and other molecules on B cells as well as antibodies able to bind the TCR and other molecules on T cells can be combined with the pharmaceutical composition of the invention.

[0270] The pharmaceutical composition of the invention may be in the form of a liposome in which protein of the present invention is combined, in addition to other pharmaceutically acceptable carriers, with amphipathic agents such as lipids which exist in aggregated form as inicelles, insoluble monolayers, liquid crystals, or lamellar layers in aqueous solution. Suitable lipids for liposomal formulation include, without limitation, monoglycerides, diglycerides, sulfatides, lysolecithins, phospholipids, saponin, bile acids, and the like. Preparation of such liposomal formulations is within the level of skill in the art, as disclosed, for example, in U.S. Pat. Nos. 4,235,871; 4,501,728; 4,837,028; and 4,737,323, all of which are incorporated herein by reference.

[0271] The amount of protein or other active ingredient of the present invention in the pharmaceutical composition of the present invention will depend upon the nature and severity of the condition being treated, and on the nature of prior treatments which the patient has undergone. Ultimately, the attending physician will decide the amount of protein or other active ingredient of the present invention with which to treat each individual patient. Initially, the attending physician will administer low doses of protein or other active ingredient of the present invention and observe the patient's response. Larger doses of protein or other active ingredient of the present invention may be administered until the optimal therapeutic effect is obtained for the patient, and at that point the dosage is not increased further. It is contemplated that the various pharmaceutical compositions used to practice the method of the present invention should contain about 0.01 μg to about 100 mg (preferably about 0.1 μg to about 10 mg, more preferably about 0.1 μg to about 1 mg) of protein or other active ingredient of the present invention per kg body weight. For compositions of the present invention which are useful for bone, cartilage, tendon or ligament regeneration, the therapeutic method includes administering the composition topically, systematically, or locally as an implant or device. When administered, the therapeutic composition for use in this invention is, of course, in a pyrogen-free, physiologically acceptable form. Further, the composition may desirably be encapsulated or injected in a viscous form for delivery to the site of bone, cartilage or tissue damage. Topical administration may be suitable for wound healing and tissue repair. Therapeutically useful agents other than a protein or other active ingredient of the invention which may also optionally be included in the composition as described above, may alternatively or additionally, be administered simultaneously or sequentially with the composition in the methods of the invention. Preferably for bone and/or cartilage formation, the composition would include a matrix capable of delivering the protein-containing or other active ingredient-containing composition to the site of bone and/or cartilage damage, providing a structure for the developing bone and cartilage and optimally capable of being resorbed into the body. Such matrices may be formed of materials presently in use for other implanted medical applications.

[0272] The choice of matrix material is based on biocompatibility, biodegradability, mechanical properties, cosmetic appearance and interface properties. The particular application of the compositions will define the appropriate formulation. Potential matrices for the compositions may be biodegradable and chemically defined calcium sulfate, tricalcium phosphate, hydroxyapatite, polylactic acid, polyglycolic acid and polyanhydrides. Other potential materials are biodegradable and biologically well-defined, such as bone or dermal collagen. Further matrices are comprised of pure proteins or extracellular matrix components. Other potential matrices are nonbiodegradable and chemically defined, such as sintered hydroxyapatite, bioglass, aluminates, or other ceramics. Matrices may be comprised of combinations of any of the above mentioned types of material, such as polylactic acid and hydroxyapatite or collagen and tricalcium phosphate. The bioceramics may be altered in composition, such as in calcium-aluminate-phosphate and processing to alter pore size, particle size, particle shape, and biodegradability. Presently preferred is a 50:50 (mole weight) copolymer of lactic acid and glycolic acid in the form of porous particles having diameters ranging from 150 to 800 microns. In some applications, it will be useful to utilize a sequestering agent, such as carboxymethyl cellulose or autologous blood clot, to prevent the protein compositions from disassociating from the matrix.

[0273] A preferred family of sequestering agents is cellulosic materials such as alkylcelluloses (including hydroxyalkylcelluloses), including methylcellulose, ethylceflulose, hydroxyethylcellulose, hydroxypropylcellulose, hydroxypropyl-methylcellulose, and carboxymethylcellulose, the most preferred being cationic salts of carboxymethylcellulose (CMC). Other preferred sequestering agents include hyaluronic acid, sodium alginate, poly(ethylene glycol), polyoxyethylene oxide, carboxyvinyl polymer and poly(vinyl alcohol). The amount of sequestering agent useful herein is 0.5-20 wt %, preferably 1-10 wt % based on total formulation weight, which represents the amount necessary to prevent desorption of the protein from the polymer matrix and to provide appropriate handling of the composition, yet not so much that the progenitor cells are prevented from infiltrating the matrix, thereby providing the protein the opportunity to assist the osteogenic activity of the progenitor cells. In further compositions, proteins or other active ingredients of the invention may be combined with other agents beneficial to the treatment of the bone and/or cartilage defect, wound, or tissue in question. These agents include various growth factors such as epidermal growth factor (EGF), platelet derived growth factor (PDGF), transforming growth factors (TGF-α and TGF-β), and insulin-like growth factor (IGF).

[0274] The therapeutic compositions are also presently valuable for veterinary applications. Particularly domestic animals and thoroughbred horses, in addition to humans, are desired patients for such treatment with proteins or other active ingredients of the present invention. The dosage regimen of a protein-containing pharmaceutical composition to be used in tissue regeneration will be determined by the attending physician considering various factors which modify the action of the proteins, e.g., amount of tissue weight desired to be formed, the site of damage, the condition of the damaged tissue, the size of a wound, type of damaged tissue (e.g., bone), the patient's age, sex, and diet, the severity of any infection, time of administration and other clinical factors. The dosage may vary with the type of matrix used in the reconstitution and with inclusion of other proteins in the pharmaceutical composition. For example, the addition of other known growth factors, such as IGF I (insulin like growth factor I), to the final composition, may also effect the dosage. Progress can be monitored by periodic assessment of tissue/bone growth and/or repair, for example, X-rays, histomorphometric determinations and tetracycline labeling.

[0275] Polynucleotides of the present invention can also be used for gene therapy. Such polynucleotides can be introduced either in vivo or ex vivo into cells for expression in a mammalian subject. Polynucleotides of the invention may also be administered by other known methods for introduction of nucleic acid into a cell or organism (including, without limitation, in the form of viral vectors or naked DNA). Cells may also be cultured ex vivo in the presence of proteins of the present invention in order to proliferate or to produce a desired effect on or activity in such cells. Treated cells can then be introduced in vivo for therapeutic purposes.

### 4.12.3 Effective Dosage

[0276] Pharmaceutical compositions suitable for use in the present invention include compositions wherein the active ingredients are contained in an effective amount to achieve its intended purpose. More specifically, a therapeutically effective amount means an amount effective to prevent development of or to alleviate the existing symptoms of the subject being treated. Determination of the effective amount is well within the capability of those skilled in the art, especially in light of the detailed disclosure provided herein. For any compound used in the method of the invention, the therapeutically effective dose can be estimated initially from appropriate in vitro assays. For example, a dose can be formulated in animal models to achieve a circulating concentration range that can be used to more accurately determine useful doses in humans. For example, a dose can be formulated in animal models to achieve a circulating concentration range that includes the IC₅₀ as determined in cell culture (i.e., the concentration of the test compound which achieves a half-maximal inhibition of the protein's biological activity). Such information can be used to more accurately determine useful doses in humans.

[0277] A therapeutically effective dose refers to that amount of the compound that results in amelioration of symptoms or a prolongation of survival in a patient. Toxicity and therapeutic efficacy of such compounds can be determined by standard pharmaceutical procedures in cell cultures or experimental animals, e.g., for determining the LD₅₀ (the dose lethal to 50% of the population) and the ED₅₀ (the dose therapeutically effective in 50% of the population). The dose ratio between toxic and therapeutic effects is the therapeutic index and it can be expressed as the ratio between LD₅₀ and ED₅₀. Compounds which exhibit high therapeutic indices are preferred. The data obtained from these cell culture assays and animal studies can be used in formulating a range of dosage for use in human. The dosage of such compounds lies preferably within a range of circulating concentrations that include the ED₅₀ with little or no toxicity. The dosage may vary within this range depending upon the dosage form employed and the route of administration utilized. The exact formulation, route of administration and dosage can be chosen by the individual physician in view of the patient's condition. See, e.g., Fingl et al., 1975, in “The Pharmacological Basis of Therapeutics”, Ch. 1 p. 1. Dosage amount and interval may be adjusted individually to provide plasma levels of the active moiety which are sufficient to maintain the desired effects, or minimal effective concentration (MEC). The MEC will vary for each compound but can be estimated from in vitro data. Dosages necessary to achieve the MEC will depend on individual characteristics and route of administration. However, HPLC assays or bioassays can be used to determine plasma concentrations.

[0278] Dosage intervals can also be determined using MEC value. Compounds should be administered using a regimen which maintains plasma levels above the MEC for 10-90% of the time, preferably between 30-90% and most preferably between 50-90%. In cases of local administration or selective uptake, the effective local concentration of the drug may not be related to plasma concentration.

[0279] An exemplary dosage regimen for polypeptides or other compositions of the invention will be in the range of about 0.01 μg/kg to 100 mg/kg of body weight daily, with the preferred dose being about 0.1 μg/kg to 25 mg/kg of patient body weight daily, varying in adults and children. Dosing may be once daily, or equivalent doses may be delivered at longer or shorter intervals.

[0280] The amount of composition administered will, of course, be dependent on the subject being treated, on the subject's age and weight, the severity of the affliction, the manner of administration and the judgment of the prescribing physician.

### 4.12.4 Packaging

[0281] The compositions may, if desired, be presented in a pack or dispenser device which may contain one or more unit dosage forms containing the active ingredient. The pack may, for example, comprise metal or plastic foil, such as a blister pack. The pack or dispenser device may be accompanied by instructions for administration. Compositions comprising a compound of the invention formulated in a compatible pharmaceutical carrier may also be prepared, placed in an appropriate container, and labeled for treatment of an indicated condition.

### 4.13 Antibodies

[0282] Also included in the invention are antibodies to proteins, or fragments of proteins of the invention. The term “antibody” as used herein refers to immunoglobulin molecules and immunologically active portions of immunoglobulin (Ig) molecules, i.e., molecules that contain an antigen binding site that specifically binds (immunoreacts with) an antigen. Such antibodies include, but are not limited to, polyclonal, monoclonal, chimeric, single chain, F_{ab}, F_{ab′} and F_{(ab′)2} fragments, and an F_{ab} expression library. In general, an antibody molecule obtained from humans relates to any of the classes IgG, IgM, IgA, IgE and IgD, which differ from one another by the nature of the heavy chain present in the molecule. Certain classes have subclasses as well, such as IgG₁, IgG₂, and others. Furthermore, in humans, the light chain may be a kappa chain or a lambda chain. Reference herein to antibodies includes a reference to all such classes, subclasses and types of human antibody species.

[0283] An isolated related protein of the invention may be intended to serve as an antigen, or a portion or fragment thereof, and additionally can be used as an immunogen to generate antibodies that immunospecifically bind the antigen, using standard techniques for polyclonal and monoclonal antibody preparation. The full-length protein can be used or, alternatively, the invention provides antigenic peptide fragments of the antigen for use as immunogens. An antigenic peptide fragment comprises at least 6 amino acid residues of the amino acid sequence of the full length protein, such as the amino acid sequences shown in SEQ ID NO: 217-432, or 649-864, and encompasses an epitope thereof such that an antibody raised against the peptide forms a specific immune complex with the full length protein or with any fragment that contains the epitope. Preferably, the antigenic peptide comprises at least 10 amino acid residues, or at least 15 amino acid residues, or at least 20 amino acid residues, or at least 30 amino acid residues. Preferred epitopes encompassed by the antigenic peptide are regions of the protein that are located on its surface; commonly these are hydrophilic regions.

[0284] In certain embodiments of the invention, at least one epitope encompassed by the antigenic peptide is a region of -related protein that is located on the surface of the protein, e.g., a hydrophilic region. A hydrophobicity analysis of the human related protein sequence will indicate which regions of a related protein are particularly hydrophilic and, therefore, are likely to encode surface residues useful for targeting antibody production. As a means for targeting antibody production, hydropathy plots showing regions of hydrophilicity and hydrophobicity may be generated by any method well known in the art, including, for example, the Kyte Doolittle or the Hopp Woods methods, either with or without Fourier transformation. See, e.g., Hopp and Woods, 1981, Proc. Nat. Acad. Sci. USA 78: 3824-3828; Kyte and Doolittle 1982, J. Mol. Biol. 157: 105-142, each of which is incorporated herein by reference in its entirety. Antibodies that are specific for one or more domains within an antigenic protein, or derivatives, fragments, analogs or homologs thereof, are also provided herein.

[0285] A protein of the invention, or a derivative, fragment, analog, homolog or ortholog thereof, may be utilized as an immunogen in the generation of antibodies that immunospecifically bind these protein components.

[0286] Various procedures known within the art may be used for the production of polyclonal or monoclonal antibodies directed against a protein of the invention, or against derivatives, fragments, analogs homologs or orthologs thereof (see, for example, Antibodies: A Laboratory Manual, Harlow E, and Lane D, 1988, Cold Spring Harbor Laboratory Press, Cold Spring Harbor, N.Y., incorporated herein by reference). Some of these antibodies are discussed below.

### 4.13.1 Polyclonal Antibodies

[0287] For the production of polyclonal antibodies, various suitable host animals (e.g., rabbit, goat, mouse or other mammal) may be immunized by one or more injections with the native protein, a synthetic variant thereof, or a derivative of the foregoing. An appropriate immunogenic preparation can contain, for example, the naturally occurring immunogenic protein, a chemically synthesized polypeptide representing the immunogenic protein, or a recombinantly expressed immunogenic protein. Furthermore, the protein may be conjugated to a second protein known to be immunogenic in the mammal being immunized. Examples of such immunogenic proteins include but are not limited to keyhole limpet hemocyanin, serum albumin, bovine thyroglobulin, and soybean trypsin inhibitor. The preparation can further include an adjuvant. Various adjuvants used to increase the immunological response include, but are not limited to, Freund's (complete and incomplete), mineral gels (e.g., aluminum hydroxide), surface active substances (e.g., lysolecithin, pluronic polyols, polyanions, peptides, oil emulsions, dinitrophenol, etc.), adjuvants usable in humans such as Bacille Calmette-Guerin and Corynebacterium parvum, or similar immunostimulatory agents. Additional examples of adjuvants which can be employed include MPL-TDM adjuvant (monophosphoryl Lipid A, synthetic trehalose dicorynomycolate).

[0288] The polyclonal antibody molecules directed against the immunogenic protein can be isolated from the mammal (e.g., from the blood) and further purified by well known techniques, such as affinity chromatography using protein A or protein G, which provide primarily the IgG fraction of immune serum. Subsequently, or alternatively, the specific antigen which is the target of the immunoglobulin sought, or an epitope thereof, may be immobilized on a column to purify the immune specific antibody by immunoaffinity chromatography. Purification of immunoglobulins is discussed, for example, by D. Wilkinson (The Scientist, published by The Scientist, Inc., Philadelphia Pa., Vol. 14, No. 8 (Apr. 17, 2000), pp. 25-28).

### 4.13.2 Monoclonal Antibodies

[0289] The term “monoclonal antibody” (MAb) or “monoclonal antibody composition”, as used herein, refers to a population of antibody molecules that contain only one molecular species of antibody molecule consisting of a unique light chain gene product and a unique heavy chain gene product. In particular, the complementarity determining regions (CDRs) of the monoclonal antibody are identical in all the molecules of the population. MAbs thus contain an antigen binding site capable of immunoreacting with a particular epitope of the antigen characterized by a unique binding affinity for it.

[0290] Monoclonal antibodies can be prepared using hybridoma methods, such as those described by Kohler and Milstein, Nature, 256:495 (1975). In a hybridoma method, a mouse, hamster, or other appropriate host animal, is typically immunized with an immunizing agent to elicit lymphocytes that produce or are capable of producing antibodies that will specifically bind to the immunizing agent. Alternatively, the lymphocytes can be immunized in vitro. The immunizing agent will typically include the protein antigen, a fragment thereof or a fusion protein thereof. Generally, either peripheral blood lymphocytes are used if cells of human origin are desired, or spleen cells or lymph node cells are used if non-human mammalian sources are desired. The lymphocytes are then fused with an immortalized cell line using a suitable fusing agent, such as polyethylene glycol, to form a hybridoma cell (Goding, Monoclonal Antibodies: Principles and Practice, Academic Press, (1986) pp. 59-103). Immortalized cell lines are usually transformed mammalian cells, particularly myeloma cells of rodent, bovine and human origin. Usually, rat or mouse myeloma cell lines are employed. The hybridoma cells can be cultured in a suitable culture medium that preferably contains one or more substances that inhibit the growth or survival of the unfused, immortalized cells. For example, if the parental cells lack the enzyme hypoxanthine guanine phosphoribosyl transferase (HGPRT or HPRT), the culture medium for the hybridomas typically will include hypoxanthine, aminopterin, and thymidine (“HAT medium”), which substances prevent the growth of HGPRT-deficient cells.

[0291] Preferred immortalized cell lines are those that fuse efficiently, support stable high level expression of antibody by the selected antibody-producing cells, and are sensitive to a medium such as HAT medium. More preferred immortalized cell lines are murine myeloma lines, which can be obtained, for instance, from the Salk Institute Cell Distribution Center, San Diego, Calif. and the American Type Culture Collection, Manassas, Va. Human myeloma and mouse-human heteromyeloma cell lines also have been described for the production of human monoclonal antibodies (Kozbor, J. Immunol., 133:3001 (1984); Brodeur et al., Monoclonal Antibody Production Techniques and Applications, Marcel Dekker, Inc., New York, (1987) pp. 51-63).

[0292] The culture medium in which the hybridoma cells are cultured can then be assayed for the presence of monoclonal antibodies directed against the antigen. Preferably, the binding specificity of monoclonal antibodies produced by the hybridoma cells is determined by immunoprecipitation or by an in vitro binding assay, such as radioimmunoassay (RIA) or enzyme-linked immunoabsorbent assay (ELISA). Such techniques and assays are known in the art. The binding affinity of the monoclonal antibody can, for example, be determined by the Scatchard analysis of Munson and Pollard, Anal. Biochem., 107:220 (1980). Preferably, antibodies having a high degree of specificity and a high binding affinity for the target antigen are isolated.

[0293] After the desired hybridoma cells are identified, the clones can be subcloned by limiting dilution procedures and grown by standard methods. Suitable culture media for this purpose include, for example, Dulbecco's Modified Eagle's Medium and RPMI-1640 medium. Alternatively, the hybridoma cells can be grown in vivo as ascites in a mammal. The monoclonal antibodies secreted by the subclones can be isolated or purified from the culture medium or ascites fluid by conventional immunoglobulin purification procedures such as, for example, protein A-Sepharose, hydroxylapatite chromatography, gel electrophoresis, dialysis, or affinity chromatography.

[0294] The monoclonal antibodies can also be made by recombinant DNA methods, such as those described in U.S. Pat. No. 4,816,567. DNA encoding the monoclonal antibodies of the invention can be readily isolated and sequenced using conventional procedures (e.g., by using oligonucleotide probes that are capable of binding specifically to genes encoding the heavy and light chains of murine antibodies). The hybridoma cells of the invention serve as a preferred source of such DNA. Once isolated, the DNA can be placed into expression vectors, which are then transfected into host cells such as simian COS cells, Chinese hamster ovary (CHO) cells, or myeloma cells that do not otherwise produce immunoglobulin protein, to obtain the synthesis of monoclonal antibodies in the recombinant host cells. The DNA also can be modified, for example, by substituting the coding sequence for human heavy and light chain constant domains in place of the homologous murine sequences (U.S. Pat. No. 4,816,567; Morrison, Nature 368. 812-13 (1994)) or by covalently joining to the immunoglobulin coding sequence all or part of the coding sequence for a non-immunoglobulin polypeptide. Such a non-immunoglobulin polypeptide can be substituted for the constant domains of an antibody of the invention, or can be substituted for the variable domains of one antigen-combining site of an antibody of the invention to create a chimeric bivalent antibody.

### 4.13.3 Humanized Antibodies

[0295] The antibodies directed against the protein antigens of the invention can further comprise humanized antibodies or human antibodies. These antibodies are suitable for administration to humans without engendering an immune response by the human against the administered immunoglobulin. Humanized forms of antibodies are chimeric immunoglobulins, immunoglobulin chains or fragments thereof (such as Fv, Fab, Fab′, F(ab′)₂ or other antigen-binding subsequences of antibodies) that are principally comprised of the sequence of a human immunoglobulin, and contain minimal sequence derived from a non-human immunoglobulin. Humanization can be performed following the method of Winter and co-workers (Jones et al., Nature, 321:522-525 (1986); Riechmann et al., Nature, 332:323-327 (1988); Verhoeyen et al., Science, 239:1534-1536 (1988)), by substituting rodent CDRs or CDR sequences for the corresponding sequences of a human antibody. (See also U.S. Pat. No. 5,225,539.) In some instances, Fv framework residues of the human immunoglobulin are replaced by corresponding non-human residues. Humanized antibodies can also comprise residues which are found neither in the recipient antibody nor in the imported CDR or framework sequences. In general, the humanized antibody will comprise substantially all of at least one, and typically two, variable domains, in which all or substantially all of the CDR regions correspond to those of a non-human immunoglobulin and all or substantially all of the framework regions are those of a human immunoglobulin consensus sequence. The humanized antibody optimally also will comprise at least a portion of an immunoglobulin constant region (Fc), typically that of a human immunoglobulin (Jones et al., 1986; Riechmann et al., 1988; and Presta, Curr. Op. Struct. Biol., 2:593-596 (1992)).

### 4.13.4 Human Antibodies

[0296] Fully human antibodies relate to antibody molecules in which essentially the entire sequences of both the light chain and the heavy chain, including the CDRs, arise from human genes. Such antibodies are termed “human antibodies”, or “fully human antibodies” herein. Human monoclonal antibodies can be prepared by the trioma technique; the human B-cell hybridoma technique (see Kozbor, et al., 1983 Immunol Today 4: 72) and the EBV hybridoma technique to produce human monoclonal antibodies (see Cole, et al., 1985 In: MONOCLONAL ANTIBODIES AND CANCER THERAPY, Alan R. Liss, Inc., pp. 77-96). Human monoclonal antibodies may be utilized in the practice of the present invention and may be produced by using human hybridomas (see Cote, et al., 1983. Proc Natl Acad Sci USA 80: 2026-2030) or by transforming human B-cells with Epstein Barr Virus in vitro (see Cole, et al., 1985 In: MONOCLONAL ANTIBODIES AND CANCER THERAPY, Alan R. Liss, Inc., pp. 77-96).

[0297] In addition, human antibodies can also be produced using additional techniques, including phage display libraries (Hoogenboom and Winter, J. Mol. Biol., 227:381 (1991); Marks et al., J. Mol. Biol., 222:581 (1991)). Similarly, human antibodies can be made by introducing human immunoglobulin loci into transgenic at is, e.g., mice in which the endogenous immunoglobulin genes have been partially or completely inactivated. Upon challenge, human antibody production is observed, which closely resembles that seen in humans in all respects, including gene rearrangement, assembly, and antibody repertoire. This approach is described, for example, in U.S. Pat. Nos. 5,545,807; 5,545,806; 5,569,825; 5,625,126; 5,633,425; 5,661,016, and in Marks et al. (Bio/Technology 10, 779-783 (1992)); Lonberg et al. (Nature 368 856-859 (1994)); Morrison (Nature 368, 812-13 (1994)); Fishwild et al, (Nature Biotechnology 1, 845-51 (1996)); Neuberger (Nature Biotechnology 14, 826 (1996)); and Lonberg and Huszar (Intern. Rev. Immunol. 13 65-93 (1995)).

[0298] Human antibodies may additionally be produced using transgenic nonhuman animals which are modified so as to produce fully human antibodies rather than the animal's endogenous antibodies in response to challenge by an antigen. (See PCT publication WO94/02602). The endogenous genes encoding the heavy and light immunoglobulin chains in the nonhuman host have been incapacitated, and active loci encoding human heavy and light chain immunoglobulins are inserted into the host's genome. The human genes are incorporated, for example, using yeast artificial chromosomes containing the requisite human DNA segments. An animal which provides all the desired modifications is then obtained as progeny by crossbreeding intermediate transgenic animals containing fewer than the full complement of the modifications. The preferred embodiment of such a nonhuman animal is a mouse, and is termed the Xenomouse™ as disclosed in PCT publications WO 96/33735 and WO 96/34096. This animal produces B cells which secrete fully human immunoglobulins. The antibodies can be obtained directly from the animal after immunization with an immunogen of interest, as, for example, a preparation of a polyclonal antibody, or alternatively from immortalized B cells derived from the animal, such as hybridomas producing monoclonal antibodies. Additionally, the genes encoding the immunoglobulins with human variable regions can be recovered and expressed to obtain the antibodies directly, or can be further modified to obtain analogs of antibodies such as, for example, single chain Fv molecules.

[0299] An example of a method of producing a nonhuman host, exemplified as a mouse, lacking expression of an endogenous immunoglobulin heavy chain is disclosed in U.S. Pat. No. 5,939,598. It can be obtained by a method including deleting the J segment genes from at least one endogenous heavy chain locus in an embryonic stem cell to prevent rearrangement of the locus and to prevent formation of a transcript of a rearranged immunoglobulin heavy chain locus, the deletion being effected by a targeting vector containing a gene encoding a selectable marker; and producing from the embryonic stem cell a transgenic mouse whose somatic and germ cells contain the gene encoding the selectable marker.

[0300] A method for producing an antibody of interest, such as a human antibody, is disclosed in U.S. Pat. No. 5,916,771. It includes introducing an expression vector that contains a nucleotide sequence encoding a heavy chain into one mammalian host cell in culture, introducing an expression vector containing a nucleotide sequence encoding a light chain into another mammalian host cell, and fusing the two cells to form a hybrid cell. The hybrid cell expresses an antibody containing the heavy chain and the light chain.

[0301] In a further improvement on this procedure, a method for identifying a clinically relevant epitope on an immunogen, and a correlative method for selecting an antibody that binds immunospecifically to the relevant epitope with high affinity, are disclosed in PCT publication WO 99/53049.

### 4.13.5 F_{ab} Fragments and Single Chain Antibodies

[0302] According to the invention, techniques can be adapted for the production of single-chain antibodies specific to an antigenic protein of the invention (see e.g., U.S. Pat. No. 4,946,778). In addition, methods can be adapted for the construction of F_{ab} expression libraries (see e.g., Huse, et al., 1989 Science 246: 1275-1281) to allow rapid and effective identification of monoclonal F_{ab} fragments with the desired specificity for a protein or derivatives, fragments, analogs or homologs thereof. Antibody fragments that contain the idiotypes to a protein antigen may be produced by techniques known in the art including, but not limited to: (i) an F_{(ab′)2} fragment produced by pepsin digestion of an antibody molecule; (ii) an F_{ab} fragment generated by reducing the disulfide bridges of an F_{(ab′)2} fragment; (iii) an F_{ab} fragment generated by the treatment of the antibody molecule with papain and a reducing agent and (iv) Fᵥ fragments.

### 4.13.6 Bispecific Antibodies

[0303] Bispecific antibodies are monoclonal, preferably human or humanized, antibodies that have binding specificities for at least two different antigens. In the present case, one of the binding specificities is for an antigenic protein of the invention. The second binding target is any other antigen, and advantageously is a cell-surface protein or receptor or receptor subunit.

[0304] Methods for making bispecific antibodies are known in the art. Traditionally, the recombinant production of bispecific antibodies is based on the co-expression of two immunoglobulin heavy-chain/light-chain pairs, where the two heavy chains have different specificities (Milstein and Cuello, Nature, 305:537-539 (1983)). Because of the random assortment of immunoglobulin heavy and light chains, these hybridomas (quadromas) produce a potential mixture of ten different antibody molecules, of which only one has the correct bispecific structure. The purification of the correct molecule is usually accomplished by affinity chromatography steps. Similar procedures are disclosed in WO 93/08829, published 13 May 1993, and in Traunecker et al., 1991 EMBO J., 10:3655-3659.

[0305] Antibody variable domains with the desired binding specificities (antibody-antigen combining sites) can be fused to immunoglobulin constant domain sequences. The fusion preferably is with an immunoglobulin heavy-chain constant domain, comprising at least part of the hinge, CH2, and CH3 regions. It is preferred to have the first heavy-chain constant region (CH1) containing the site necessary for light-chain binding present in at least one of the fusions. DNAs encoding the immunoglobulin heavy-chain fusions and, if desired, the immunoglobulin light chain, are inserted into separate expression vectors, and are co-transfected into a suitable host organism. For further details of generating bispecific antibodies see, for example, Suresh et al., Methods in Enzymology, 121:210 (1986).

[0306] According to another approach described in WO 96/27011, the interface between a pair of antibody molecules can be engineered to maximize the percentage of heterodimers which are recovered from recombinant cell culture. The preferred interface comprises at least a part of the CH3 region of an antibody constant domain. In this method, one or more small amino acid side chains from the interface of the first antibody molecule are replaced with larger side chains (e.g. tyrosine or tryptophan). Compensatory “cavities” of identical or similar size to the large side chain(s) are created on the interface of the second antibody molecule by replacing large amino acid side chains with smaller ones (e.g. alanine or threonine). This provides a mechanism for increasing the yield of the heterodimer over other unwanted end-products such as homodimers.

[0307] Bispecific antibodies can be prepared as full length antibodies or antibody fragments (e.g. F(ab′)₂ bispecific antibodies). Techniques for generating bispecific antibodies from antibody fragments have been described in the literature. For example, bispecific antibodies can be prepared using chemical linkage. Brennan et al., Science 229:81 (1985) describe a procedure wherein intact antibodies are proteolytically cleaved to generate F(ab′)₂ fragments. These fragments are reduced in the presence of the dithiol complexing agent sodium arsenite to stabilize vicinal dithiols and prevent intermolecular disulfide formation. The Fab′ fragments generated are then converted to thionitrobenzoate (TNB) derivatives. One of the Fab′-TNB derivatives is then reconverted to the Fab′-thiol by reduction with mercaptoethylamine and is mixed with an equimolar amount of the other Fab′-TNB derivative to form the bispecific antibody. The bispecific antibodies produced can be used as agents for the selective immobilization of enzymes.

[0308] Additionally, Fab′ fragments can be directly recovered from E. coli and chemically coupled to form bispecific antibodies. Shalaby et al., J. Exp. Med. 175:217-225 (1992) describe the production of a fully humanized bispecific antibody F(ab′)₂ molecule. Each Fab′ fragment was separately secreted from E. coli and subjected to directed chemical coupling in vitro to form the bispecific antibody. The bispecific antibody thus formed was able to bind to cells overexpressing the ErbB2 receptor and normal human T cells, as well as trigger the lytic activity of human cytotoxic lymphocytes against human breast tumor targets.

[0309] Various techniques for making and isolating bispecific antibody fragments directly from recombinant cell culture have also been described. For example, bispecific antibodies have been produced using leucine zippers. Kostelny et al., J. Immunol. 148(5):1547-1553 (1992). The leucine zipper peptides from the Fos and Jun proteins were linked to the Fab′ portions of two different antibodies by gene fusion. The antibody homodimers were reduced at the hinge region to form monomers and then re-oxidized to form the antibody heterodimers. This method can also be utilized for the production of antibody homodimers. The “diabody” technology described by Hollinger et al., Proc. Natl. Acad. Sci. USA 90:6444-6448 (1993) has provided an alternative mechanism for making bispecific antibody fragments. The fragments comprise a heavy-chain variable domain (V_{H}) connected to a light-chain variable domain (V_{L}) by a linker which is too short to allow pairing between the two domains on the same chain. Accordingly, the V_{H} and V_{L} domains of one fragment are forced to pair with the complementary V_{L} and V_{H} domains of another fragment, thereby forming two antigen-binding sites. Another strategy for making bispecific antibody fragments by the use of single-chain Fv (sFv) dimers has also been reported. See, Gruber et al., J. Immunol. 152:5368 (1994).

[0310] Antibodies with more than two valencies are contemplated. For example, trispecific antibodies can be prepared. Tutt et al., J. Immunol. 147:60 (1991). Exemplary bispecific antibodies can bind to two different epitopes, at least one of which originates in the protein antigen of the invention. Alternatively, an anti-antigenic arm of an immunoglobulin molecule can be combined with an arm which binds to a triggering molecule on a leukocyte such as a T-cell receptor molecule (e.g. CD2, CD3, CD28, or B7), or Fc receptors for IgG (FcγR), such as FcγRI (CD64), FcγRfI (CD32) and FcγRIII (CD16) so as to focus cellular defense mechanisms to the cell expressing the particular antigen. Bispecific antibodies can also be used to direct cytotoxic agents to cells which express a particular antigen. These antibodies possess an antigen-binding arm and an arm which binds a cytotoxic agent or a radionuclide chelator, such as EOTUBE, DPTA, DOTA, or TETA. Another bispecific antibody of interest binds the protein antigen described herein and further binds tissue factor (TF).

### 4.13.7 Heteroconjugate Antibodies

[0311] Heteroconjugate antibodies are also within the scope of the present invention. Heteroconjugate antibodies are composed of two covalently joined antibodies. Such antibodies have, for example, been proposed to target immune system cells to unwanted cells (U.S. Pat. No. 4,676,980), and for treatment of HIV infection (WO 91/00360; WO 92/200373; EP 03089). It is contemplated that the antibodies can be prepared in vitro using known methods in synthetic protein chemistry, including those involving crosslinking agents. For example, immunotoxins can be constructed using a disulfide exchange reaction or by forming a thioether bond. Examples of suitable reagents for this purpose include iminothiolate and methyl-4-mercaptobutyrimidate and those disclosed, for example, in U.S. Pat. No. 4,676,980.

### 4.13.8 Effector Function Engineering

[0312] It can be desirable to modify the antibody of the invention with respect to effector function, so as to enhance, e.g., the effectiveness of the antibody in treating cancer. For example, cysteine residue(s) can be introduced into the Fc region, thereby allowing interchain disulfide bond formation in this region. The homodimeric antibody thus generated can have improved internalization capability and/or increased complement-mediated cell killing and antibody-dependent cellular cytotoxicity (ADCC). See Caron et al., J. Exp Med., 176: 1191-1195 (1992) and Shopes, J. Immunol., 148: 2918-2922 (1992). Homodimeric antibodies with enhanced anti-tumor activity can also be prepared using heterobifunctional cross-linkers as described in Wolff et al. Cancer Research, 53: 2560-2565 (1993). Alternatively, an antibody can be engineered that has dual Fc regions and can thereby have enhanced complement lysis and ADCC capabilities. See Stevenson et al., Anti-Cancer Drug Design, 3: 219-230 (1989).

### 4.13.9 Immunoconjugates

[0313] The invention also pertains to immunoconjugates comprising an antibody conjugated to a cytotoxic agent such as a chemotherapeutic agent, toxin (e.g., an enzymatically active toxin of bacterial, fungal, plant, or animal origin, or fragments thereof), or a radioactive isotope (i.e., a radioconjugate).

[0314] Chemotherapeutic agents useful in the generation of such immunoconjugates have been described above. Enzymatically active toxins and fragments thereof that can be used include diphtheria A chain, nonbinding active fragments of diphtheria toxin, exotoxin A chain (from Pseudomonas aeruginosa), ricin A chain, abrin A chain, modeccin A chain, alpha-sarcin, Aleurites fordii proteins, dianthin proteins, Phytolaca americana proteins (PAPI, PAPII, and PAP-S), Momordica charantia inhibitor, curcin, crotin, sapaonaria officinalis inhibitor, gelonin, mitogellin, restrictocin, phenomycin, enomycin, and the tricothecenes. A variety of radionuclides are available for the production of radioconjugated antibodies. Examples include ²¹²Bi, ¹³¹I, ¹³¹In, ⁹⁰Y, and ¹⁸⁶Re.

[0315] Conjugates of the antibody and cytotoxic agent are made using a variety of bifunctional protein-coupling agents such as N-succinimidyl-3-(2-pyridyldithiol) propionate (SPDP), iminothiolane (IT), bifunctional derivatives of imidoesters (such as dimethyl adipimidate HCL), active esters (such as disuccinimidyl suberate), aldehydes (such as glutareldehyde), bis-azido compounds (such as bis (p-azidobenzoyl) hexanediamine), bis-diazonium derivatives (such as bis-(p-diazoniumbenzoyl)-ethylenediamine), diisocyanates (such as tolyene 2,6-diisocyanate), and bis-active fluorine compounds (such as 1,5-difluoro-2,4-dinitrobenzene). For example, a ricin immunotoxin can be prepared as described in Vitetta et al., Science, 238: 1098 (1987). Carbon-14-labeled 1-isothiocyanatobenzyl-3-methyldiethylene triaminepentaacetic acid (MX-DTPA) is an exemplary chelating agent for conjugation of radionucleotide to the antibody. See WO94/11026.

[0316] In another embodiment, the antibody can be conjugated to a “receptor” (such as streptavidin) for utilization in tumor pretargeting wherein the antibody-receptor conjugate is administered to the patient, followed by removal of unbound conjugate from the circulation using a clearing agent and then administration of a “ligand” (e.g., avidin) that is in turn conjugated to a cytotoxic agent.

### 4.14 Computer Readable Sequences

[0317] In one application of this embodiment, a nucleotide sequence of the present invention can be recorded on computer readable media. As used herein, “computer readable media” refers to any medium which can be read and accessed directly by a computer. Such media include, but are not limited to: magnetic storage media, such as floppy discs, hard disc storage medium, and magnetic tape; optical storage media such as CD-ROM; electrical storage media such as RAM and ROM; and hybrids of these categories such as magnetic/optical storage media. A skilled artisan can readily appreciate how any of the presently known computer readable mediums can be used to create a manufacture comprising computer readable medium having recorded thereon a nucleotide sequence of the present invention. As used herein, “recorded” refers to a process for storing information on computer readable medium. A skilled artisan can readily adopt any of the presently known methods for recording information on computer readable medium to generate manufactures comprising the nucleotide sequence information of the present invention.

[0318] A variety of data storage structures are available to a skilled artisan for creating a computer readable medium having recorded thereon a nucleotide sequence of the present invention. The choice of the data storage structure will generally be based on the means chosen to access the stored information. In addition, a variety of data processor programs and formats can be used to store the nucleotide sequence information of the present invention on computer readable medium. The sequence information can be represented in a word processing text file, formatted in commercially-available software such as WordPerfect and Microsoft Word, or represented in the form of an ASCII file, stored in a database application, such as DB2, Sybase, Oracle, or the like. A skilled artisan can readily adapt any number of data processor structuring formats (e.g. text file or database) in order to obtain computer readable medium having recorded thereon the nucleotide sequence information of the present invention.

[0319] By providing any of the nucleotide sequences SEQ ID NO: 1-216, or 433-648 or a representative fragment thereof; or a nucleotide sequence at least 95% identical to any of the nucleotide sequences of SEQ ID NO: 1-216, or 433-648 in computer readable form, a skilled artisan can routinely access the sequence information for a variety of purposes. Computer software is publicly available which allows a skilled artisan to access sequence information provided in a computer readable medium. The examples which follow demonstrate how software which implements the BLAST (Altschul et al., J. Mol. Biol. 215:403-410 (1990)) and BLAZE (Brutlag et al., Comp. Chem. 17:203-207 (1993)) search algorithms on a Sybase system is used to identify open reading frames (ORFs) within a nucleic acid sequence. Such ORFs may be protein encoding fragments and may be useful in producing commercially important proteins such as enzymes used in fermentation reactions and in the production of commercially useful metabolites.

[0320] As used herein, “a computer-based system” refers to the hardware means, software means, and data storage means used to analyze the nucleotide sequence information of the present invention. The minimum hardware means of the computer-based systems of the present invention comprises a central processing unit (CPU), input means, output means, and data storage means. A skilled artisan can readily appreciate that any one of the currently available computer-based systems are suitable for use in the present invention. As stated above, the computer-based systems of the present invention comprise a data storage means having stored therein a nucleotide sequence of the present invention and the necessary hardware means and software means for supporting and implementing a search means. As used herein, “data storage means” refers to memory which can store nucleotide sequence information of the present invention, or a memory access means which can access manufactures having recorded thereon the nucleotide sequence information of the present invention.

[0321] As used herein, “search means” refers to one or more programs which are implemented on the computer-based system to compare a target sequence or target structural motif with the sequence information stored within the data storage means. Search means are used to identify fragments or regions of a known sequence which match a particular target sequence or target motif. A variety of known algorithms are disclosed publicly and a variety of commercially available software for conducting search means are and can be used in the computer-based systems of the present invention. Examples of such software includes, but is not limited to, Smith-Waterman, MacPattern (EMBL), BLASTN and BLASTA (NPOLYPEPTIDEIA). A skilled artisan can readily recognize that any one of the available algorithms or implementing software packages for conducting homology searches can be adapted for use in the present computer-based systems. As used herein, a “target sequence” can be any nucleic acid or amino acid sequence of six or more nucleotides or two or more amino acids. A skilled artisan can readily recognize that the longer a target sequence is, the less likely a target sequence will be present as a random occurrence in the database. The most preferred sequence length of a target sequence is from about 10 to 300 amino acids, more preferably from about 30 to 100 nucleotide residues. However, it is well recognized that searches for commercially important fragments, such as sequence fragments involved in gene expression and protein processing, may be of shorter length.

[0322] As used herein, “a target structural motif,” or “target motif,” refers to any rationally selected sequence or combination of sequences in which the sequence(s) are chosen based on a three-dimensional configuration which is formed upon the folding of the target motif. There are a variety of target motifs known in the art. Protein target motifs include, but are not limited to, enzyme active sites and signal sequences. Nucleic acid target motifs include, but are not limited to, promoter sequences, hairpin structures and inducible expression elements (protein binding sequences).

### 4.15 Triple Helix Formation

[0323] In addition, the fragments of the present invention, as broadly described, can be used to control gene expression through triple helix formation or antisense DNA or RNA, both of which methods are based on the binding of a polynucleotide sequence to DNA or RNA. Polynucleotides suitable for use in these methods are preferably 20 to 40 bases in length and are designed to be complementary to a region of the gene involved in transcription (triple helix—see Lee et al., Nucl. Acids Res. 6:3073 (1979); Cooney et al., Science 15241:456 (1988); and Dervan et al., Science 251:1360 (1991)) or to the mRNA itself (antisense—Olmno, J. Neurochem. 56:560 (1991); Oligodeoxynucleotides as Antisense Inhibitors of Gene Expression, CRC Press, Boca Raton, Fla. (1988)). Triple helix-formation optimally results in a shut-off of RNA transcription from DNA, while antisense RNA hybridization blocks translation of an mRNA molecule into polypeptide. Both techniques have been demonstrated to be effective in model systems. Information contained in the sequences of the present invention is necessary for the design of an antisense or triple helix oligonucleotide.

### 4.16 Diagnostic Assays and Kits

[0324] The present invention further provides methods to identify the presence or expression of one of the ORFs of the present invention, or homolog thereof, in a test sample, using a nucleic acid probe or antibodies of the present invention, optionally conjugated or otherwise associated with a suitable label.

[0325] In general, methods for detecting a polynucleotide of the invention can comprise contacting a sample with a compound that binds to and forms a complex with the polynucleotide for a period sufficient to form the complex, and detecting the complex, so that if a complex is detected, a polynucleotide of the invention is detected in the sample. Such methods can also comprise contacting a sample under stringent hybridization conditions with nucleic acid primers that anneal to a polynucleotide of the invention under such conditions, and amplifying annealed polynucleotides, so that if a polynucleotide is amplified, a polynucleotide of the invention is detected in the sample.

[0326] In general, methods for detecting a polypeptide of the invention can comprise contacting a sample with a compound that binds to and forms a complex with the polypeptide for a period sufficient to form the complex, and detecting the complex, so that if a complex is detected, a polypeptide of the invention is detected in the sample.

[0327] In detail, such methods comprise incubating a test sample with one or more of the antibodies or one or more of the nucleic acid probes of the present invention and assaying for binding of the nucleic acid probes or antibodies to components within the test sample.

[0328] Conditions for incubating a nucleic acid probe or antibody with a test sample vary. Incubation conditions depend on the format employed in the assay, the detection methods employed, and the type and nature of the nucleic acid probe or antibody used in the assay. One skilled in the art will recognize that any one of the commonly available hybridization, amplification or immunological assay formats can readily be adapted to employ the nucleic acid probes or antibodies of the present invention. Examples of such assays can be found in Chard, T., An Introduction to Radioimmunoassay and Related Techniques, Elsevier Science Publishers, Amsterdam, The Netherlands (1986); Bullock, G. R. et al., Techniques in Immunocytochemistry, Academic Press, Orlando, Fla. Vol. 1 (1982), Vol. 2 (1983), Vol. 3 (1985); Tijssen, P., Practice and Theory of immunoassays: Laboratory Techniques in Biochemistry and Molecular Biology, Elsevier Science Publishers, Amsterdam, The Netherlands (1985). The test samples of the present invention include cells, protein or membrane extracts of cells, or biological fluids such as sputum, blood, serum, plasma, or urine. The test sample used in the above-described method will vary based on the assay format, nature of the detection method and the tissues, cells or extracts used as the sample to be assayed. Methods for preparing protein extracts or membrane extracts of cells are well known in the art and can be readily be adapted in order to obtain a sample which is compatible with the system utilized.

[0329] In another embodiment of the present invention, kits are provided which contain the necessary reagents to carry out the assays of the present invention. Specifically, the invention provides a compartment kit to receive, in close confinement, one or more containers which comprises: (a) a first container comprising one of the probes or antibodies of the present invention; and (b) one or more other containers comprising one or more of the following: wash reagents, reagents capable of detecting presence of a bound probe or antibody.

[0330] In detail, a compartment kit includes any kit in which reagents are contained in separate containers. Such containers include small glass containers, plastic containers-or strips of plastic or paper. Such containers allows one to efficiently transfer reagents from one compartment to another compartment such that the samples and reagents are not cross-contaminated, and the agents or solutions of each container can be added in a quantitative fashion from one compartment to another. Such containers will include a container which will accept the test sample, a container which contains the antibodies used in the assay, containers which contain wash reagents (such as phosphate buffered saline, Tris-buffers, etc.), and containers which contain the reagents used to detect the bound antibody or probe. Types of detection reagents include labeled nucleic acid probes, labeled secondary antibodies, or in the alternative, if the primary antibody is labeled, the enzymatic, or antibody binding reagents which are capable of reacting with the labeled antibody. One skilled in the art will readily recognize that the disclosed probes and antibodies of the present invention can be readily incorporated into one of the established kit formats which are well known in the art.

### 4.17 Medical Imaging

[0331] The novel polypeptides and binding partners of the invention are useful in medical imaging of sites expressing the molecules of the invention (e.g., where the polypeptide of the invention is involved in the immune response, for imaging sites of inflammation or infection). See, e.g., Kunkel et al., U.S. Pat. No. 5,413,778. Such methods involve chemical attachment of a labeling or imaging agent, administration of the labeled polypeptide to a subject in a pharmaceutically acceptable carrier, and imaging the labeled polypeptide in vivo at the target site.

### 4.18 Screening Assays

[0332] Using the isolated proteins and polynucleotides of the invention, the present invention further provides methods of obtaining and identifying agents which bind to a polypeptide encoded by an ORF corresponding to any of the nucleotide sequences set forth in SEQ ID NO: 1-216, or 433-648, or bind to a specific domain of the polypeptide encoded by the nucleic acid. In detail, said method comprises the steps of:

[0333] (a) contacting an agent with an isolated protein encoded by an ORF of the present invention, or nucleic acid of the invention; and

[0334] (b) determining whether the agent binds to said protein or said nucleic acid.

[0335] In general, therefore, such methods for identifying compounds that bind to a polynucleotide of the invention can comprise contacting a compound with a polynucleotide of the invention for a time sufficient to form a polynucleotide/compound complex, and detecting the complex, so that if a polynucleotide/compound complex is detected, a compound that binds to a polynucleotide of the invention is identified.

[0336] Likewise, in general, therefore, such methods for identifying compounds that bind to a polypeptide of the invention can comprise contacting a compound with a polypeptide of the invention for a time sufficient to form a polypeptide/compound complex, and detecting the complex, so that if a polypeptide/compound complex is detected, a compound that binds to a polynucleotide of the invention is identified.

[0337] Methods for identifying compounds that bind to a polypeptide of the invention can also comprise contacting a compound with a polypeptide of the invention in a cell for a time sufficient to form a polypeptide/compound complex, wherein the complex drives expression of a receptor gene sequence in the cell, and detecting the complex by detecting reporter gene sequence expression, so that if a polypeptide/compound complex is detected, a compound that binds a polypeptide of the invention is identified.

[0338] Compounds identified via such methods can include compounds which modulate the activity of a polypeptide of the invention (that is, increase or decrease its activity, relative to activity observed in the absence of the compound). Alternatively, compounds identified via such methods can include compounds which modulate the expression of a polynucleotide of the invention (that is, increase or decrease expression relative to expression levels observed in the absence of the compound). Compounds, such as compounds identified via the methods of the invention, can be tested using standard assays well known to those of skill in the art for their ability to modulate activity/expression.

[0339] The agents screened in the above assay can be, but are not limited to, peptides, carbohydrates, vitamin derivatives, or other pharmaceutical agents. The agents can be selected and screened at random or rationally selected or designed using protein modeling techniques.

[0340] For random screening, agents such as peptides, carbohydrates, pharmaceutical agents and the like are selected at random and are assayed for their ability to bind to the protein encoded by the ORF of the present invention. Alternatively, agents may be rationally selected or designed. As used herein, an agent is said to be “rationally selected or designed” when the agent is chosen based on the configuration of the particular protein. For example, one skilled in the art can readily adapt currently available procedures to generate peptides, pharmaceutical agents and the like, capable of binding to a specific peptide sequence, in order to generate rationally designed antipeptide peptides, for example see Hurby et al., Application of Synthetic Peptides: Antisense Peptides,” In Synthetic Peptides, A User's Guide, W. H. Freeman, NY (1992), pp. 289-307, and Kaspczak et al., Biochemistry 28:9230-8 (1989), or pharmaceutical agents, or the like.

[0341] In addition to the foregoing, one class of agents of the present invention, as broadly described, can be used to control gene expression through binding to one of the ORFs or EMFs of the present invention. As described above, such agents can be randomly screened or rationally designed/selected. Targeting the ORF or EMF allows a skilled artisan to design sequence specific or element specific agents, modulating the expression of either a single ORF or multiple ORFs which rely on the same EMF for expression control. One class of DNA binding agents are agents which contain base residues which hybridize or form a triple helix formation by binding to DNA or RNA. Such agents can be based on the classic phosphodiester, ribonucleic acid backbone, or can be a variety of sulfhydryl or polymeric derivatives which have base attachment capacity.

[0342] Agents suitable for use in these methods preferably contain 20 to 40 bases and are designed to be complementary to a region of the gene involved in transcription (triple helix—see Lee et al., Nucl. Acids Res. 6:3073 (1979); Cooney et al., Science 241:456 (1988); and Dervan et al., Science 251:1360 (1991)) or to the mRNA itself (antisense—Okano, J. Neurochem. 56:560 (1991); Oligodeoxynucleotides as Antisense Inhibitors of Gene Expression, CRC Press, Boca Raton, Fla. (1988)). Triple helix-formation optimally results in a shut-off of RNA transcription from DNA, while antisense RNA hybridization blocks translation of an mRNA molecule into polypeptide. Both techniques have been demonstrated to be effective in model systems. Information contained in the sequences of the present invention is necessary for the design of an antisense or triple helix oligonucleotide and other DNA binding agents.

[0343] Agents which bind to a protein encoded by one of the ORFs of the present invention can be used as a diagnostic agent. Agents which bind to a protein encoded by one of the ORFs of the present invention can be formulated using known techniques to generate a pharmaceutical composition.

### 4.19 Use of Nucleic Acids as Probes

[0344] Another aspect of the subject invention is to provide for polypeptide-specific nucleic acid hybridization probes capable of hybridizing with naturally occurring nucleotide sequences. The hybridization probes of the subject invention may be derived from any of the nucleotide sequences SEQ ID NO: 1-216, or 433-648. Because the corresponding gene is only expressed in a limited number of tissues, a hybridization probe derived from any of the nucleotide sequences SEQ ID NO: 1-216, or 433-648 can be used as an indicator of the presence of RNA of cell type of such a tissue in a sample.

[0345] Any suitable hybridization technique can be employed, such as, for example, in situ hybridization. PCR as described in U.S. Pat. Nos. 4,683,195 and 4,965,188 provides additional uses for oligonucleotides based upon the nucleotide sequences. Such probes used in PCR may be of recombinant origin, may be chemically synthesized, or a mixture of both. The probe will comprise a discrete nucleotide sequence for the detection of identical sequences or a degenerate pool of possible sequences for identification of closely related genomic sequences.

[0346] Other means for producing specific hybridization probes for nucleic acids include the cloning of nucleic acid sequences into vectors for the production of mRNA probes. Such vectors are known in the art and are commercially available and may be used to synthesize RNA probes in vitro by means of the addition of the appropriate RNA polymerase as T7 or SP6 RNA polymerase and the appropriate radioactively labeled nucleotides. The nucleotide sequences may be used to construct hybridization probes for mapping their respective genomic sequences. The nucleotide sequence provided herein may be mapped to a chromosome or specific regions of a chromosome using well known genetic and/or chromosomal mapping techniques. These techniques include in situ hybridization, linkage analysis against known chromosomal markers, hybridization screening with libraries or flow-sorted chromosomal preparations specific to known chromosomes, and the like. The technique of fluorescent in situ hybridization of chromosome spreads has been described, among other places, in Verma et al (1988) Human Chromosomes: A Manual of Basic Techniques, Pergamon Press, New York N.Y.

[0347] Fluorescent in situ hybridization of chromosomal preparations and other physical chromosome mapping techniques may be correlated with additional genetic map data. Examples of genetic map data can be found in the 1994 Genome Issue of Science (265:1981f). Correlation between the location of a nucleic acid on a physical chromosomal map and a specific disease (or predisposition to a specific disease) may help delimit the region of DNA associated with that genetic disease. The nucleotide sequences of the subject invention may be used to detect differences in gene sequences between normal, carrier or affected individuals.

### 4.20 Preparation of Support Bound Oligonucleotides

[0348] Oligonucleotides, i.e., small nucleic acid segments, may be readily prepared by, for example, directly synthesizing the oligonucleotide by chemical means, as is commonly practiced using an automated oligonucleotide synthesizer.

[0349] Support bound oligonucleotides may be prepared by any of the methods known to those of skill in the art using any suitable support such as glass, polystyrene or Teflon. One strategy is to precisely spot oligonucleotides synthesized by standard synthesizers. Immobilization can be achieved using passive adsorption (Inouye & Hondo, (1990) J. Clin. Microbiol. 28(6) 1469-72); using UV light (Nagata et al., 1985; Dahlen et al., 1987; Morrissey & Collins, (1989) Mol. Cell Probes 3(2) 189-207) or by covalent binding of base modified DNA (Keller et al., 1988; 1989); all references being specifically incorporated herein.

[0350] Another strategy that may be employed is the use of the strong biotin-streptavidin interaction as a linker. For example, Broude et al. (1994) Proc. Natl. Acad. Sci. USA 91(8) 3072-6, describe the use of biotinylated probes, although these are duplex probes, that are immobilized on streptavidin-coated magnetic beads. Streptavidin-coated beads may be purchased from Dynal, Oslo. Of course, this same linking chemistry is applicable to coating any surface with streptavidin. Biotinylated probes may be purchased from various sources, such as, e.g., Operon Technologies (Alameda, Calif.).

[0351] Nunc Laboratories (Naperville, Ill.) is also selling suitable material that could be used. Nunc Laboratories have developed a method by which DNA can be covalently bound to the microwell surface termed Covalink NH. CovaLink NH is a polystyrene surface grafted with secondary amino groups (>NH) that serve as bridge-heads for further covalent coupling. CovaLink Modules may be purchased from Nunc Laboratories. DNA molecules may be bound to CovaLink exclusively at the 5′-end by a phosphoramidate bond, allowing immobilization of more than 1 pmol of DNA (Rasmussen et al., (1991) Anal. Biochem. 198(1) 138-42).

[0352] The use of CovaLink NH strips for covalent binding of DNA molecules at the 5′-end has been described (Rasmussen et al., (1991). In this technology, a phosphoramidate bond is employed (Chu et al., (1983) Nucleic Acids Res. 11(8) 6513-29). This is beneficial as immobilization using only a single covalent bond is preferred. The phosphoramidate bond joins the DNA to the CovaLink NH secondary amino groups that are positioned at the end of spacer arms covalently grafted onto the polystyrene surface through a 2 nm long spacer arm. To link an oligonucleotide to CovaLink NH via an phosphoramidate bond, the oligonucleotide terminus must have a 5′-end phosphate group. It is, perhaps, even possible for biotin to be covalently bound to CovaLink and then streptavidin used to bind the probes.

[0353] More specifically, the linkage method includes dissolving DNA in water (7.5 ng/μl) and denaturing for 10 min. at 95° C. and cooling on ice for 10 min. Ice-cold 0.1 M 1-methylimidazole, pH 7.0 (1-MeIm₇), is then added to a final concentration of 10 mM 1-MeIm₇. The single-stranded DNA solution is then dispensed into CovaLink NH strips (75 μl/well) standing on ice.

[0354] Carbodiimide 0.2 M 1-ethyl-3-(3-dimethylaminopropyl)carbodiimide (EDC), dissolved in 10 mM 1-MeIm₇, is made fresh and 25 μl added per well. The strips are incubated for 5 hours at 50° C. After incubation the strips are washed using, e.g., Nunc-Immuno Wash; first the wells are washed 3 times, then they are soaked with washing solution for 5 min., and finally they are washed 3 times (where in the washing solution is 0.4 N NaOH, 0.25% SDS heated to 50° C.).

[0355] It is contemplated that a further suitable method for use with the present invention is that described in PCT Patent Application WO 90/03382 (Southern & Maskos), incorporated herein by reference. This method of preparing an oligonucleotide bound to a support involves attaching a nucleoside 3′-reagent through the phosphate group by a covalent phosphodiester link to aliphatic hydroxyl groups carried by the support. The oligonucleotide is then synthesized on the supported nucleoside and protecting groups removed from the synthetic oligonucleotide chain under standard conditions that do not cleave the oligonucleotide from the support. Suitable reagents include nucleoside phosphoraridite and nucleoside hydrogen phosphorate.

[0356] An on-chip strategy for the preparation of DNA probe for the preparation of DNA probe arrays may be employed. For example, addressable laser-activated photodeprotection may be employed in the chemical synthesis of oligonucleotides directly on a glass surface, as described by Fodor et al. (1991) Science 251(4995) 767-73, incorporated herein by reference. Probes may also be immobilized on nylon supports as described by Van Ness et al. (1991) Nucleic Acids Res. 19(12) 3345-50; or linked to Teflon using the method of Duncan & Cavalier (1988) Anal. Biochem. 169(1) 104-8; all references being specifically incorporated herein.

[0357] To link an oligonucleotide to a nylon support, as described by Van Ness et al. (1991), requires activation of the nylon surface via alkylation and selective activation of the 5′-amine of oligonucleotides with cyanuric chloride.

[0358] One particular way to prepare support bound oligonucleotides is to utilize the light-generated synthesis described by Pease et al., (1994) PNAS USA 91(11) 5022-6, incorporated herein by reference). These authors used current photolithographic techniques to generate arrays of immobilized oligonucleotide probes (DNA chips). These methods, in which light is used to direct the synthesis of oligonucleotide probes in high-density, miniaturized arrays, utilize photolabile 5′-protected N-acyl-deoxynucleoside phosphoramidites, surface linker chemistry and versatile combinatorial synthesis strategies. A matrix of 256 spatially defined oligonucleotide probes may be generated in this manner.

### 4.21 Preparation of Nucleic Acid Fragments

[0359] The nucleic acids may be obtained from any appropriate source, such as cDNAs, genomic DNA, chromosomal DNA, microdissected chromosome bands, cosmid or YAC inserts, and RNA, including mRNA without any amplification steps. For example, Sambrook et al. (1989) describes three protocols for the isolation of high molecular weight DNA from mammalian cells (p. 9.14-9.23).

[0360] DNA fragments may be prepared as clones in M13, plasmid or lambda vectors and/or prepared directly from genomic DNA or cDNA by PCR or other amplification methods. Samples may be prepared or dispensed in multiwell plates. About 100-1000 ng of DNA samples may be prepared in 2-500 ml of final volume.

[0361] The nucleic acids would then be fragmented by any of the methods known to those of skill in the art including, for example, using restriction enzymes as described at 9.24-9.28 of Sambrook et al. (1989), shearing by ultrasound and NaOH treatment.

[0362] Low pressure shearing is also appropriate, as described by Schriefer et al. (1990) Nucleic Acids Res. 18(24) 7455-6, incorporated herein by reference). In this method, DNA samples are passed through a small French pressure cell at a variety of low to intermediate pressures. A lever device allows controlled application of low to intermediate pressures to the cell. The results of these studies indicate that low-pressure shearing is a useful alternative to sonic and enzymatic DNA fragmentation methods.

[0363] One particularly suitable way for fragmenting DNA is contemplated to be that using the two base recognition endonuclease, CviJI, described by Fitzgerald et al. (1992) Nucleic Acids Res. 20(14) 3753-62. These authors described an approach for the rapid fragmentation and fractionation of DNA into particular sizes that they contemplated to be suitable for shotgun cloning and sequencing.

[0364] The restriction endonuclease CviJI normally cleaves the recognition sequence PuGCPy between the G and C to leave blunt ends. Atypical reaction conditions, which alter the specificity of this enzyme (CviJI**), yield a quasi-random distribution of DNA fragments form the small molecule pUC19 (2688 base pairs). Fitzgerald et al. (1992) quantitatively evaluated the randomness of this fragmentation strategy, using a CviJI** digest of pUC19 that was size fractionated by a rapid gel filtration method and directly ligated, without end repair, to a lac Z minus M13 cloning vector. Sequence analysis of 76 clones showed that CviJI** restricts pyGCPy and PuGCPu, in addition to PuGCPy sites, and that new sequence data is accumulated at a rate consistent with random fragmentation.

[0365] As reported in the literature, advantages of this approach compared to sonication and agarose gel fractionation include: smaller amounts of DNA are required (0.2-0.5 μg instead of 2-5 μg); and fewer steps are involved (no preligation, end repair, chemical extraction, or agarose gel electrophoresis and elution are needed

[0366] Irrespective of the manner in which the nucleic acid fragments are obtained or prepared, it is important to denature the DNA to give single stranded pieces available for hybridization. This is achieved by incubating the DNA solution for 2-5 minutes at 80-90° C. The solution is then cooled quickly to 2° C. to prevent renaturation of the DNA fragments before they are contacted with the chip. Phosphate groups must also be removed from genomic DNA by methods known in the art.

### 4.22 Preparation of DNA Arrays

[0367] Arrays may be prepared by spotting DNA samples on a support such as a nylon membrane. Spotting may be performed by using arrays of metal pins (the positions of which correspond to an array of wells in a microtiter plate) to repeated by transfer of about 20 nl of a DNA solution to a nylon membrane. By offset printing, a density of dots higher than the density of the wells is achieved. One to 25 dots may be accommodated in 1 mm², depending on the type of label used. By avoiding spotting in some preselected number of rows and columns, separate subsets (subarrays) may be formed. Samples in one subarray may be the same genomic segment of DNA (or the same gene) from different individuals, or may be different, overlapped genomic clones. Each of the subarrays may represent replica spotting of the same samples. In one example, a selected gene segment may be amplified from 64 patients. For each patient, the amplified gene segment may be in one 96-well plate (all 96 wells containing the same sample). A plate for each of the 64 patients is prepared. By using a 96-pin device, all samples may be spotted on one 8×12 cm membrane. Subarrays may contain 64 samples, one from each patient. Where the 96 subarrays are identical, the dot span may be 1 mm² and there may be a 1 mm space between subarrays.

[0368] Another approach is to use membranes or plates (available from NUNC, Naperville, Ill.) which may be partitioned by physical spacers e.g. a plastic grid molded over the membrane, the grid being similar to the sort of membrane applied to the bottom of multiwell plates, or hydrophobic strips. A fixed physical spacer is not preferred for imaging by exposure to flat phosphor-storage screens or x-ray films.

[0369] The present invention is illustrated in the following examples. Upon consideration of the present disclosure, one of skill in the art will appreciate that many other embodiments and variations may be made in the scope of the present invention. Accordingly, it is intended that the broader aspects of the present invention not be limited to the disclosure of the following examples. The present invention is not to be limited in scope by the exemplified embodiments which are intended as illustrations of single aspects of the invention, and compositions and methods which are functionally equivalent are within the scope of the invention. Indeed, numerous modifications and variations in the practice of the invention are expected to occur to those skilled in the art upon consideration of the present preferred embodiments. Consequently, the only limitations which should be placed upon the scope of the invention are those which appear in the appended claims.

[0370] All references cited within the body of the instant specification are hereby incorporated by reference in their entirety.

### 5. EXAMPLES

### 5.1 Example 1

[0371] Novel Nucleic Acid Sequences Obtained From Various Libraries

[0372] A plurality of novel nucleic acids were obtained from cDNA libraries prepared from various human tissues and in some cases isolated from a genomic library derived from human chromosome using standard PCR, SBH sequence signature analysis and Sanger sequencing techniques. The inserts of the library were amplified with PCR using primers specific for the vector sequences which flank the inserts. Clones from cDNA libraries were spotted on nylon membrane filters and screened with oligonucleotide probes (e.g., 7-mers) to obtain signature sequences. The clones were clustered into groups of similar or identical sequences. Representative clones were selected for sequencing.

[0373] In some cases, the 5′ sequence of the amplified inserts was then deduced using a typical Sanger sequencing protocol. PCR products were purified and subjected to fluorescent dye terminator cycle sequencing. Single pass gel sequencing was done using a 377 Applied Biosysterns (ABI) sequencer to obtain the novel nucleic acid sequences.

### 5.2 Example 2

[0374] Assemblage of Novel Nucleic Acids

[0375] The contigs or nucleic acids of the present invention, designated as SEQ ID NO: 433-648 were assembled using an EST sequence as a seed. Then a recursive algorithm was used to extend the seed EST into an extended assemblage, by pulling additional sequences from different databases (i.e., Hyseq's database containing EST sequences, dbEST version 115, gb pri 115, and UniGene version 103, and exons from public domain genomic sequences predicated by GenScan) that belong to this assemblage. The algorithm terminated when there was no additional sequences from the above databases that would extend the assemblage. Further, inclusion of component sequences into the assemblage was based on a BLASTN hit to the extending assemblage with BLAST score greater than 300 and percent identity greater than 95%.

[0376] Table 6 sets forth the novel predicted polypeptides (including proteins) encoded by the novel polynucleotides (SEQ ID NO: 433-648) of the present invention, and their corresponding translation start and stop nucleotide locations to each of SEQ ID NO: 433-648. Table 6 also indicates the method by which the polypeptide was predicted. Method A refers to a polypeptide obtained by using a software program called FASTY (available from http://fasta.bioch.virgina.edu) which selects a polypeptide based on a comparison of the translated novel polynucleotide to known polynucleotides (W. R. Pearson, Methods in Enzymology, 183:63-98 (1990), herein incorporated by reference). Method B refers to a polypeptide obtained by using a software program called GenScan for human/vertebrate sequences (available from Stanford University, Office of Technology Licensing) that predicts the polypeptide based on a probabilistic model of gene structure/compositional properties (C. Burge and S. Karlin, J. Mol. Biol., 268:78-94 (1997), incorporated herein by reference). Method C refers to a polypeptide obtained by using a Hyseq proprietary software program that translates the novel polynucleotide and its complementary strand into six possible amino acid sequences (forward and reverse frames) and chooses the polypeptide with the longest open reading frame.

### 5.3 Example 3

[0377] Novel Nucleic Acids

[0378] Using PHRAP (Univ. of Washington) or CAP4 (Paracel), full-length gene sequences and their corresponding protein sequences were generated from the assemblage. Any frame shifts and incorrect stop codons were corrected by hand editing. During editing, the sequence was checked using FASTXY algorithm against Genbank (i.e., dbEST, gb pri, UniGene, and Genpept). Other computer programs which may have been used in the editing process were phredPhrap and Consed (University of Washington) and ed-ready, ed-ext and gczip-2 (Hyseq, Inc.). In some cases RACE (Rapid Amplification of cDNA Ends) was performed to further extend the sequence in the 5′ direction. The full-length nucleotide sequences are shown in the Sequence Listing as SEQ ID NO: 1-216. The corresponding polypeptide sequences are SEQ ID NO: 217-432.

[0379] Table 1 shows the various tissue sources of SEQ ID NO: 1-216.

[0380] The nearest neighbor results for polypeptides encoded by SEQ ID NO: 1-216 (i.e. SEQ ID NO: 217-432) were obtained by a BLASTP (version 2.0al 19MP-WashU) search against Genpept release 123 and Genseq release 200110 (Derwent), using BLAST algorithm. The nearest neighbor result showed the closest homologue with functional annotation for SEQ ID NO: 1-216 from Genpept. The translated amino acid sequences for which the nucleic acid sequence encodes are shown in the Sequence Listing. The homologs with identifiable functions for SEQ ID NO: 1-216 are shown in Table 2 below.

[0381] Using eMatrix software package (Stanford University, Stanford, Calif.) (Wu et al., J. Comp. Biol., Vol. 6 pp. 219-235 (1999) herein incorporated by reference), polypeptides encoded by SEQ ID NO: 1-216 (i.e. SEQ ID NO: 217-432) were examined to determine whether they had identifiable signature regions. Table 3 shows the signature region found in the indicated polypeptide sequences, the description of the signature, the eMatrix p-value(s) and the position(s) of the signature within the polypeptide sequence.

[0382] Using the pFam software program (Sonnhammer et al., Nucleic Acids Res., Vol. 26(1) pp. 320-322 (1998) herein incorporated by reference) polypeptides encoded by SEQ ID NO: 1-216 (i.e. SEQ ID NO: 217-432) were examined for domains with homology to certain peptide domains. Table 4 shows the name of the domain found, the description, the p-value and the pFam score for the identified domain within the sequence.

[0383] The nucleotide sequence within the sequences that codes for signal peptide sequences and their cleavage sites can be determined from using Neural Network SignalP V1.1 program (from Center for Biological Sequence Analysis, The Technical University of Denmark). The process for identifying prokaryotic and eukaryotic signal peptides and their cleavage sites are also disclosed by Henrik Nielson, Jacob Engelbrecht, Soren Brunak, and Gunnar von Heijne in the publication “Identification of prokaryotic and eukaryotic signal peptides and prediction of their cleavage sites” Protein Engineering, Vol. 10, no. 1, pp. 1-6 (1997), incorporated herein by reference. A maximum S score and a mean S score, as described in the Nielson et al, as reference, were obtained for the polypeptide sequences. Table 7 shows the position of the signal peptide in each of the polypeptides and the maximum score and mean score associated with that signal peptide.

[0384] The GeneAtlas™ software package (Molecular Simulations Inc. (MSI), San Diego, Calif.) was used to predict the three-dimensional structure models for the polypeptides encoded by SEQ ID NO 1-216 (i.e. SEQ ID NO: 217-432). Models were generated by (1) PSI-BLAST which is a multiple alignment sequence profile-based searching developed by Altschul et al, (Nucl. Acids. Res. 25, 3389-3408 (1997)), (2) High Throughput Modeling (HTM) (Molecular Simulations Inc. (MSI) San Diego, Calif.,) which is an automated sequence and structure searching procedure (http://www.msi.com/), and (3) SeqFold™ which is a fold recognition method described by Fischer and Eisenberg (J. Mol. Biol. 209, 779-791 (1998)). This analysis was carried out, in part, by comparing the polypeptides of the invention with the known NMR (nuclear magnetic resonance) and x-ray crystal three-dimensional structures as templates. Table 8 shows, “PDB ID”, the Protein DataBase (PDB) identifier given to template structure; “Chain ID”, identifier of the subcomponent of the PDB template structure; “Compound Information”, information of the PDB template structure and/or its subcomponents; “PDB Function Annotation” gives function of the PDB template as annotated by the PDB files (http:/www.rcsb.org/PDB/); start and end amino acid position of the protein sequence aligned; PSI-BLAST score, the verify score, the SeqFold score, and the Potential(s) of Mean Force (PMF). The verify score is produced by GeneAtlas™ software (MSI), is based on Dr. Eisenberg's Profile-3D threading program developed in Dr. David Eisenberg's laboratory (U.S. Pat. No. 5,436,850 and Luthy, Bowie, and Eisenberg, Nature, 356:83-85 (1992)) and a publication by R. Sanchez and A. Sali, Proc. Natl. Acad. Sci. USA, 95:13597-12502. The verify score produced by GeneAtlas normalizes the verify score for proteins with different lengths so that a unified cutoff can be used to select good models as follows:
Verify score (normalized)=(raw score−½ high score)/(½ high score)

[0385] The PFM score, produced by GeneAtlas™ software (MSI), is a composite scoring function that depends in part on the compactness of the model, sequence identity in the alignment used to build the model, pairwise and surface mean force potentials (MFP). As given in table 8, a verify score between 0 to 1.0, with 1 being the best, represents a good model. Similarly, a PMF score between 0 to 1.0, with 1 being the best, represents a good model. A SeqFold™ score of more than 50 is considered significant. A good model may also be determined by one of skill in the art based all the information in Table 8 taken in totality.

[0386] Table 5 is a correlation table of all of the sequences and SEQ ID numbers.

LENGTHY TABLE REFERENCED HERE
US20070049743A1-20070301-T00001
Please refer to the end of the specification for access instructions.

[0387] *The 16 tissue-mRNAs and their vendor source, are as follows: 1) Normal adult brain mRNA (Invitrogen), 2) normal adult kidney mRNA (Invitrogen), 3) normal adult liver mRNA (Invitrogen), 4) normal fetal brain mRNA (Invitrogen), 5) normal fetal kidney mRNA (Invitrogen), 6) normal fetal liver mRNA (Invitrogen), 7) normal fetal skin mRNA (Invitrogen), 8) human adrenal gland mRNA (Clontech), 9) human bone marrow mRNA (Clontech), 10) human leukemia lymphablastic mRNA (Clontech), 11) human thymus mRNA (Clontech), 12) human lymph node mRNA (Clontech), 13) human spinal cord mRNA (Clontech), 14) human thyroid mRNA (Clontech), 15) human esophagus mRNA (BioChain), 16) human conceptional umbilical cord mRNA (BioChain).

LENGTHY TABLE REFERENCED HERE
US20070049743A1-20070301-T00002
Please refer to the end of the specification for access instructions.

LENGTHY TABLE REFERENCED HERE
US20070049743A1-20070301-T00003
Please refer to the end of the specification for access instructions.

LENGTHY TABLE REFERENCED HERE
US20070049743A1-20070301-T00004
Please refer to the end of the specification for access instructions.

LENGTHY TABLE REFERENCED HERE
US20070049743A1-20070301-T00005
Please refer to the end of the specification for access instructions.

LENGTHY TABLE REFERENCED HERE
US20070049743A1-20070301-T00006
Please refer to the end of the specification for access instructions.

LENGTHY TABLE REFERENCED HERE
US20070049743A1-20070301-T00007
Please refer to the end of the specification for access instructions.

LENGTHY TABLE REFERENCED HERE
US20070049743A1-20070301-T00008
Please refer to the end of the specification for access instructions.

LENGTHY TABLE
The patent application contains a lengthy table section. A copy of the table is available in electronic form from the USPTO web site (http://seqdata.uspto.gov/?pageRequest=docDetail&DocID=US20070049743A1). An electronic copy of the table will also be available from the USPTO upon request and payment of the fee set forth in 37 CFR 1.19(b)(3).

The application's sequence listing, which the Patent Office published only in electronic form, follows.

SEQUENCE LISTING (864 sequences)

SEQ ID NO: 1 - DNA, 1019 bp, Homo sapiens
  CDS (154)..(966)
cgagcagggtgcggcggcggcggggcgctccggggaggccaggacagctgatggttgtggcagaaacatctcaaggtagctggtccgcccccacttccccatctacctcttgtcctccccccaacaccaccaccaccctggctcccctccctcatgaccgcctggatcctcctgcctgtcagcctgtcagcgttctccatcactggcatatggactgtgtatgccatggctgtgatgaaccaccatgtatgccctgtggagaactggtcctacaacgagtcctgccctcctgaccctgctgagcaagggggtcccaagacctgctgcaccctggacgatgtccccctcatcagcaagtgtggctcctatcccccagaaagctgcctcttcagcctcattggcaacatgggtgctttcatggtggccctgatctgcctcctgcgctacgggcagctcctggagcagagtcggcactcttgggttaacaccacggcactcatcacaggctgcaccaacgctgcgggcctcttggtggttggcaactttcaggtggatcatgccaggtctctgcactacgttggagctggcgtggccttccctgcggggctgctctttgtttgcctgcactgtgctctctcctaccaaggggccaccgccccgctggacctggctgtggcctatctgcgaagtgtgctggctgtcatcgcctttatcaccctggtcctcagtggagtcttctttgtccatgagagttctcagctgcaacatggggcagccctgtgtgagtgggtgtgtgtcatcgatatcctcattttctatggcaccttcagctacgagtttggggcagtctcctcagacacactggtggctgcactgcagcctacccctggccgggcctgcaagtcctccgggagcagcagcacctccacccacctcaactgtgcccccgagagcatcgctatgatctaaggtctggggagggtggctggcccggcctccacagcaccccaccccatatc

SEQ ID NO: 2 - DNA, 1182 bp, Homo sapiens
  CDS (157)..(867)
  misc_feature (1)...(1182): n = a,t,c or g
accatcgtccangtccncggattctccggcgcaccgtacgctgggacgtgtggtttcagctcgtgcgcctccttgtgggtttttgacgtttagcgactattgcgcctgcgccagcgccggctgcgagactggggccgtggctgctggtcccgggtgatgctaggcggctccctgggctccaggctgttgcggggtgtaggtgggagtcacggacggttcggggcccgaggtgtccgcgaaggtggcgcagccatggcggcaggggagagcatggctcagcggatggtctgggtggacctggagatgacaggattggacattgagaaggaccagattattgagatggcctgtctgataactgactctgatctcaacattttggctgaaggtcctaacctgattataaaacaaccagatgagttgctggacagcatgtcagattggtgtaaggagcatcacgggaagtctggccttaccaaggcagtgaaggagagtacaattacattgcagcaggcagagtatgaatttctgtcctttgtacgacagcagactcctccagggctctgtccacttgcaggaaattcagttcatgaagataagaagtttcttgacaaatacatgccccagttcatgaaacatcttcattatagaataattgatgtgagcactgttaaagaactgtgcagacgctggtatccagaagaatatgaatttgcaccaaagaaggctgcttctcatagggcacttgatgacattagtgaaagcatcaaagagcttcagttttaccgaaataacatcttcaagaaaaaaatagatgaaaagaagaggaaaattatagaaaatggggaaaatgagaagaccgtgagttgatgccagttatcatgctgccactacatcgttatctggaggcaacttctggtggtttttttttctcacgctgatggcttggcagagcaccttcggttaacttgcatctccagattgattactcaagcagacagcacacgaaatactatttttctcctaatatgctgtttccattatgacacagcagctcctttgtaagtaccaggtcatgtccatcccttggtacatatatgcatttgcttttaaaccatttcttttgtttaaataaataaataagtaaataaagctagttctattgaaatgcaaaaaaaaaaa

SEQ ID NO: 3 - DNA, 1295 bp, Homo sapiens
  CDS (79)..(1080)
gtccgcgcacgcagctgactttgtcttctccgcacgactgttacagaggtctccagagccttctctctcctgtgcaaaatggcaactcttaaggaaaaactcattgcaccagttgcggaagaagaggcaacagttccaaacaataagatcactgtagtgggtgttggacaagttggtatggcgtgtgctatcagcattctgggaaagtctctggctgatgaacttgctcttgtggatgttttggaagataagcttaaaggagaaatgatggatctgcagcatgggagcttatttcttcagacacctaaaattgtggcagataaagattattctgtgaccgccaattctaagattgtagtggtaactgcaggagtccgtcagcaagaaggggagagtcggctcaatctggtgcagagaaatgttaatgtcttcaaattcattattcctcagatcgtcaagtacagtcctgattgcatcataattgtggtttccaacccagtggacattcttacgtatgttacctggaaactaagtggattacccaaacaccgcgtgattggaagtggatgtaatctggattctgctagatttcgctaccttatggctgaaaaacttggcattcatcccagcagctgccatggatggattttgggggaacatggcgactcaagtgtggctgtgtggagtggtgtgaatgtggcaggtgtttctctccaggaattgaatccagaaatgggaactgacaatgatagtgaaaattggaaggaagtgcataagatggtggttgaaagtgcctatgaagtcatcaagctaaaaggatataccaactgggctattggattaagtgtggctgatcttattgaatccatgttgaaaaatctatccaggattcatcccgtgtcaacaatggtaaaggggatgtatggcattgagaatgaagtcttcctgagccttccatgtatcctcaatgcccggggattaaccagcgttatcaaccagaagctaaaggatgatgaggttgctcagctcaagaaaagtgcagataccctgtgggacatccagaaggacctaaaagacctgtgactagtgagctctaggctgtagaaatttaaaaactacaatgtgattaactcgagcctttagttttcatccatgtacatggatcacagtttgctttgatcttcttcaatatgtgaatttgggctcacagaatcaaagcctatgcttggtttaatgcttgcaatctgagctcttgaacaaataaaattaactattgtagtgtgaaaaaaaaaaaa

SEQ ID NO: 4 - DNA, 1617 bp, Homo sapiens
  CDS (65)..(1342)
tggagtctgagccggcgccgctcagtgtgaggtggtttctgcgggtgaggctggcgcccgtaccatgagcgaggcggacgggctgcgacagcgccggcccctgcggccgcaggtcgtcacagacgatgatggccaggccccggaggctaaggacggcagctcctttagcggcagagttttccgagtgaccttcttgatgctggctgtttctctcaccgttcccctgcttggagccatgatgctgctggaatctcctatagatccacagcctctcagacagatctctggaattgcattattttgcagcttcaaagaacccccgctcttgcttggtgttctgcatccaaatacgaagctgcgacaggcagaaaggctgtttgaaaatcaacttgttggaccggagtccatagcacatattggggatgtgatgtttactgggacagcagatggccgggtcgtaaaacttgaaaatggtgaaatagagaccattgcccggtttggttcgggcccttgcaaaacccgagatgatgagcctgtgtgtgggagacccctgggtatccgtgcagggcccaatgggactctctttgtggccgatgcatacaagggactatttgaagtaaatccctggaaacgtgaagtgaaactgctgctgtcctccgagacacccattgaggggaagaacatgtcctttgtgaatgatcttacagtcactcaggatgggaggaagatttatttcaccgattctagcagcaaatggcaaagacgagactacctgcttctggtgatggagggcacagatgacgggcgcctgctggagtatgatactgtgaccagggaagtaaaagttttattggaccagctgcggttcccgaatggagtccagctgtctcctgcagaagactttgtcctggtggcagaaacaaccatggccaggatacgaagagtctacgtttctggcctgatgaagggcggggctgatctgtttgtggagaacatgcctggatttccagacaacatccggcccagcagctctggggggtactgggtgggcatgtcgaccatccgccctaaccctgggttttccatgctggatttcttatctgagagaccctggattaaaaggatgatttttaagctctttagtcaagagacggtgatgaagtttgtgccgcggtacagcctcgtcctagaactcagcgacagcggtgccttccggagaagcctgcatgatcccgatgggctggtggccacctacatcagcgaggtgcacgaacacgatgggcacctgtacctgggctctttcaggtcccccttcctctgcagactcagcctccaggctgtttagccctcccagatagctgcccctgccacgcaggccaggagtcttcacactcaggcaccaggcctggtccaggaggagctgtggacacagtcgtggttcaagtgtccacatgcacctgttagtccctgagaggtggtgggaatggctgcttcattcctcgaggatgcccgggccccacctgggcttgtctttctgtttagagggaagtgtaacatatctgccatgaggaacataaattcatgtaaagccattttctcttaaacaaaaaaaaaaaa

SEQ ID NO: 5 - DNA, 1476 bp, Homo sapiens
  CDS (248)..(1174)
gctgctggagctgcagcccgaccgcgagcgtgccaagcggcttcagcagctagcggacgtggcggcggcccccctcaggacaccaccagattcccctcttcccgcggcctcgccatggcgacccacggacagacttgcgcgcgtcgatcggatcaatcacttttctagaggaagtagcagtccctcttgtgagagcgcaaggtcattacttgtgctcctaagggcgtggacgtgctttgtggaatgaatgagctggtgtaatgagctcagattgcctgcccttaagcagcacagcattggccgaggacttgagagtcacattacaatgtgtattcctccatcatatgctgaccttggcaaagctgccagagatattttcaacaaaggatttggttttgggttggtgaaactggatgtgaaaacaaagtcttgcagtggcgtggaattttcaacgtccggttcatctaatacagacactggtaaagttactgggaccttggagaccaaatacaagtggtgtgagtatggtctgactttcacagaaaagtggaacactgataacactctgggaacagaaatcgcaattgaagaccagatttgtcaaggtttgaaactgacatttgatactaccttctcaccaaacacaggaaagaaaagtggtaaaatcaagtcttcttacaagagggagtgtataaaccttggttgtgatgttgactttgattttgctggacctgcaatccatggttcagctgtctttggttatgagggctggcttgctggctaccagatgacctttgacagtgccaaatcaaagctgacaaggaataactttgcagtgggctacaggactggggacttccagctacacactaatgtcaatgatgggacagaatttggaggatcaatttatcagaaagtttgtgaagatcttgacacttcagtaaaccttgcttggacatcaggtaccaactgcactcgttttggcattgcagctaaatatcagttggatcccactgcttccatttctgcaaaagtcaacaactctagcttaattggagtaggctatactcagactctgaggcctggtgtgaagcttacactctctgctctggtagatgggaagagcattaatgctggaggccacaaggttgggctcgccctggagttggaggcttaatccagctgaaagaaacctttgggaatggatatcagaagatttggccttaatatatttccattgtgaccagcagcaggcttttttccccccagaagatgatcaaaacaaaggatgatctcaacaagagctgtattttaagtatttagacagttctttgttagctggtttctagttggttatctagttaccaatgctgcagtcctgcagtcacctatacattatttaaatgtatttaactgttaaatgcgctacccaccaataatgaaatagacctttatgaaaactgtgaaaaaaaaaaa

SEQ ID NO: 6 - DNA, 789 bp, Homo sapiens
  CDS (158)..(565)
gctccacttaccaggccgcggctaccccgccgtcccccccgactcccgccaccccgctctctcaggctcttcaggatccaagtccgtaggccctttaaggggtctagttgccgtttgcgaggccctgggactttggtcccagacagcggggatccggatggcttccgtgcggatccgagaggccaaggagggagactgtggagatatcctgaggctgattcgggagctagccgaattcgaaaaactctcggatcaggtgaagatcagtgaagaagccctgagagcagatggctttggagacaatcctttctatcactgtttggtagcagagattcttccagcgcccgggaagctactgggtcaagggattggttccaaaataatcaaaaaggtggctgaggtggccttggataagggctgctcccaattccgcctggccgtcctggactggaaccagagggccatggacttgtacaaggccctaggagcccaagatctgacggaagctgagggctggcactttttttgctttcaaggagaggcaacgagaaagttggcaggaaagtgacgccatccctaggaggatttctgtcttgagtttttccttccccatcagctgaagcacttttcagagactacgtccacagacactgatgctgaggcctccctggaggaaggagggttaggggtgcctatcctcaagtattggaagagcagaattgagggagagaccttttttccttgttgagggtgaaaaataaataagaattacatgtcaaaaaaaaaaaa

SEQ ID NO: 7 - DNA, 520 bp, Homo sapiens
  CDS (90)..(395)
actactactactaaattcgcggccggtcgaccttcgccaggctctctgctgactcaagttcttcagttcacgatcttctagttgcagcgatgagtgcacgagtgagatcaagatccagaggaagaggagatggtcaggaggctcccgatgtggttgcattcgtggctcccggtgaatctcagcaagaggaaccaccaactgacaatcaggatattgaacctggacaagagagagaaggaacacctccgatcgaagaacgtaaagtagaaggtgattgccaggaaatggatctggaaaagactcggagtgagcgtggagatggctctgatgtaaaagagaagactccacctaatcctaagcatgctaagactaaagaagcaggagatgggcagccataagttaaaaagaagacaagctgaagctacacacatggctgatgtcacattgaaaatgtgactgaaaatttgaaaattctctcaataaagtttgagttttctctgaagaaaaaaaaaaaaaaaaa

SEQ ID NO: 8 - DNA, 4440 bp, Homo sapiens
  CDS (650)..(4135)
tcaacatatgaaaaatcaatgtaatatttcatattaacagttggaagactcacaattcatagtttcagaatttacaacacaaacctacaggaataaagacaatgtagtattagaataaggtcagatatatagatcaatggacagaattgacagtccagaaatacacccatacgattacggtcacctgatttttgactaaggttccaaaacaattcactaggggaaagaatagtcttgtcaaaaaatggtgctcagacaagtggatagccataagcacagaatgagtttggacccctatctcaaatctcaaatacaaacattaactccgaattaatcaaatgcctaaatttaagagctaaaattttaaagctcttagaagaaaacataggtacacatctttgtgactttgaattaggtcacggtttccttgacatgacacttaaaagtacaagcaacaaaagaaaaaaatagataaaatgaacttcagcaaaattagaatgtttatgcttcagaaaacactgtgaagaaagtgatcagacaactcacagaatgggaaaaatatttgtgaatcatatctcttaataagggtccagcagaaaagggcaaaggtggaaatggaggaggaaaacctccttctggtccaaaccgaatgaatggtcatcaccaacagaatggagtggaaaacatgatgttgtttgaagttgttaaaatgggcaagagtgctatgcagtcggtggtagatgattggatagaatcatacaagcatgaccgagatatagcacttcttgaccttatcaacttttttattcagtgttcaggctgtaaaggagttgtcacagcagaaatgtttagacatatgcagaactctgagataattcgaaaaatgactgaagaattcgatgaggatagtggagattatccacttaccatggctggtcctcagtggaagaagttcaaatccagtttttgtgaattcattggcgtgttagtacggcaatgtcaatatagtatcatatatgatgagtatatgatggatacagtcatttcacttcttacaggattgtctgactcacaagtcagagcatttcgacatacaagcaccctggcagctatgaagttgatgacagctttggtgaatgtggcactaaatcttagcattaatatggataatacacaaagacaatatgaagcagaacgaaataaaatgattgggaaacgagccaatgagaggctagaactcctgctacaaaagcggaaagagcttcaggaaaatcaagatgaaatagaaaatatgatgaatgcaatatttaaaggagtgtttgtacatagataccgtgatgcgatacgtgaaattcgagctatttgcattgaagagattggcatttggatgaagatgtatagtgatgcctttcttaatgacagttatttaaaatatgttggttggactatgcatgataagcaaggtgaagtaagactcaaatgtcttactgctctacaagggctttattataacaaagagcttaattccaaactggaactttttaccagtcggttcaaggatagaattgtgtctatgacccttgacaaagaatatgatgttgcagtacaagcaataaaattactcactcttgttttacagagtagtgaagaagttctcactgcagaagattgtgaaaatgtctatcatctggtttattcagctcaccggccagtagcagtagcagctggagaatttctctacaaaaagctcttcagtcgtagagatccagaggaggatggaatgatgaaaagaagaggaagacaaggtccaaatgccaaccttgttaagacattggtttttttctttctagaaagtgagttacatgagcatgcagcataccttgtggatagcatgtgggactgtgctactgagctgctgaaagactgggaatgtatgaatagcttgttactggaagagccacttagtggagaggaagcactaacagataggcaagagagtgctctgattgaaataatgctttgtaccattagacaagcggctgaatgtcatcctcccgtgggaagagggacaggaaaaagggtgcttacagcaaaggagaagaagacacagttggatgataggacaaaaatcactgagctttttgccgtggcccttcctcagttattagcaaaatactctgtagatgcagaaaaggtgactaacttgttgcagttgcctcagtactttgatttggaaatatataccactggacgattagaaaagcatttggatgccttattgcgacagatccggaatattgtagagaagcacacagatacagatgttttggaagcatgttctaaaacttaccatgcactctgtaatgaagagttcacaatcttcaacagagtagatatttcaagaagtcaactgatagatgaattggcagataaatttaaccggcttcttgaagattttctgcaagagggtgaagaacctgatgaagatgatgcatatcaggtattgtcaacattgaagaggatcactgcttttcataatgcccatgacctttcaaagagggatttatttgcttgtaattacaaactcttgaaaactggaatcgaaaatggagacatgcctgagcagattgttattcacgcactgcagtgtactcactatgtaatcctttggcaacttgctaagataactgaaagcagctctacaaaggaggacttgctgcgtttaaagaaacaaatgagagtattttgtcagatatgtcaacattacctgaccaacgtgaatactactgttaaggaacaggccttcactattctgtgtgatattttgatgatcttcagccatcagattatgtcaggagggcgtgacatgttagagccattagtgtatacccctgattcttcattgcagtctgagttgctcagctttattttggatcatgtcttcattgaacaggatgatgataataatagtgcagatggtcagcaagaggatgaagccagtaaaattgaagctctgcacaagagaagaaatttacttgcagcattttgtaagctaattgtatatactgtggtggagatgaatacagctgcagatatcttcaaacagtatatgaagtattataatgactatggagatatcatcaaagaaacaatgagtaaaacaaggcagatagacaaaattcagtgtgctaagacccttattctcagtctgcaacagctttttaatgaaatgatacaagaaaatggctataattttgatagatcatcctctacatttagtggcataaaagaacttgctcgacgttttgctttaacttttggacttgatcagttgaaaacaagagaagccattgccatgctacacaaagatggcatagaatttgcttttaaagagcctaatccgcaaggggagagccatccacctttaaatttggcatttcttgatattctgagtgaattttcttctaaactacttcgacaagacaaaagaacagtgtatgtttacttggaaaagttcatgacctttcagatgtcactccgaagagaggatgtgtggcttccactgatgtcttaccgaaattctttgctagctggtggtgatgatgacaccatgtcagtcattagtggaatcagcagccgggggtcaacagtacggagtaaaaaatcaaaaccatctacaggaaaacggaaagtggttgagggcatgcagctttcactcactgaagaaagtagtagtagtgacagtatgtggttaagcagagaacaaacactgcacacccctgttatgatgcagacaccacaactcacctccactattatgagagagcccaaaagattacggcctgaggatagcttcatgagtgtttatccaatgcagactgaacatcatcaaacacctcttgattataatcggcgtggcacaagcctaatggaagatgatgaagagccaattgtggaagatgttatgatgtcctcagaagggaggattgaggatcttaatgagggaatggattttgacaccatggatatagatttgccaccatcaaagaacagacgagagagaacagaactgaagcctgatttctttgatccagcttcaattatggatgaatcagttcttggagtgtcaatgttttaataccagtacacaattaaatctgtggtgaagtcattttctaagtggaagaggaaattttaaagtgtggtagatacagtgaaattctgtacagatttttctctaaggagaatatgacatgcttatgcttaccaagatcaagtgcattgaggggcagttttgtttgcctgaataaacgtaaaggacaagtaaacaatttgatgataagctacagtttttcttagaaagtaaatattttatttatgcgctgttagttggcttttgaatcgattatttcatgcttttttttaaaaaaaaaaaaaaaa

SEQ ID NO: 9 - DNA, 596 bp, Homo sapiens
  CDS (22)..(420)
cgctggtcttcgctggacaccatgaatcacactgtccaaaccttcttctctcctgtcaacagtggccagccccccaactatgagatgctcaaggaggagcacgaggtggctgtgctgggggcgccccacaaccctgctcccccgacgtccaccgtgatccacatccgcagcgagacctccgtgcccgaccatgtcgtctggtccctgttcaacaccctcttcatgaacccctgctgcctgggcttcatagcattcgcctactccgtgaagtctagggacaggaagatggttggcgacgtgaccggggcccaggcctatgcctccaccgccaagtgcctgaacatctgggccctgattctgggcatcctcatgaccattctgctcatcgtcatcccagtgctgatcttccaggcctatggatagatcaggaggcatcactgaggccaggagctctgcccatgacctgtatcccacgtactccaacttccattcctcgccctgcccccggagccgagtcctgtatcagccctttatcctcacacgcttttctacaatggcattcaataaagtgcacgtgtttctggtcgacgcggccg

SEQ ID NO: 10 - DNA, 3227 bp, Homo sapiens
  CDS (1672)..(2802)
tgttggaagttctggccagggcaatcaggcaggagaaggaaataaagggtattcaattaggaaaagaggaagtcaaattgtccctgtttgcagatgacatgattgtatatctagaaaaccccattgtctcagcccaaaatctccttaagctgataagcaacttcagcaaagtctcaggatacaaaatcaatgtgcaaaaatcacagtcattcttatacaccaataacagacaaacagggagccaaatcatgagtgaactcccattcacaattgcttcaaagagaataaaatacctaggaatccaacttacaagggatgtgaaggacctcttcaaggagaactacaaaccactgctcaatgaaataaaagaggatacaaacaaatggaagaacattccatgctcatggataggaagaatcaatatcatgaaaatggccatactacccaaggtaatttatagattcaatgccacccccatcaagctaccaacgactttcttcacagaactggaaaaaactactttaaagttcatatggaatcaaaaaagagcccgcatcgccaagtcaatcctaagccaaaagaacaaagcaagaataaagctggaggcatcactattcaaactatactacaaggctacagtaaccgaaacagcatggtactggtaccaaaacagagatatagatcaatggaacagaacagagccctcagaaataatgccgcatatctacaactatctgatctttgacaaacctgagaaaaacaagcaatggggaaaggattccctatttaataaatggtgctgggaaaactggctagccatatgtagaaagctgaaactggatcccttccttacaccttatacaaaaatcaattcaagatggattaaagacttaaatgttagacctaaagccataaaagtcctagaagaaaacctaggcaataccattcaggacataggcatgggcaaggacttcatgactaaaacaccaaaagcaatggcaacaaaagccaaaattgacaaatgggatataattaacctaaagagcttctgcacagcagaagaaactaccatcagagtgaacaggcaacctacagaatgggagaaaaattttgcaatctacccatctgacaaaggactaatatccagattctacaaagaactcaaacaaatttacaagaaaaaaaaaaccatcaaaaagtgggcaaaggatatgaacagacacttctcaaacggagacatttatgcagccaacagacacatgaaaaaatgctcatcatcactggtcatcagagaaatgcaaatcaaaatcacaatgagataccatctcataccagttagaatggcaatcattaaaaagtcaggaaacaacaggtgttggagaggatgtggagaaataggaacacttttacactgttggtgggactgtaaactagttcaaccattgtggaagacagtgtggcgattcctcaaggatctagaactagaaataccatttgactcagcaatcccattactgggtatatacccaaaagattataaatcatgctgctataaagacacatgtacacagctacgcggcggcggcggagcgcaggcctcgtgccgttacggccatcacggcggccgcagtggcgtcctggagccctcctcagtgctgaagctgctgaaagatggcagaagaagtggtggtagtagccaaatttgattatgtggcccaacaagaacaagagttggacatcaagaagaatgagagattatggcttctggatgattctaagtcctggtggcgagttcgaaattccatgaataaaacaggttttgtgccttctaactatgtggaaaggaaaaacagtgctcggaaagcatctattgtgaaaaacctaaaggataccttaggcattggaaaagtgaaaagaaaacctagtgtgccagattctgcatctcctgctgatgatagttttgttgacccaggggaacgtctctatgacctcaacatgcccgcttatgtgaaatttaactacatggctgagagagaggatgaattatcattgataaaggggacaaaggtgatcgtcatggagaaatgcagtgatgggtggtggcgtggtagctacaatggacaagttggatggttcccttcaaactatgtaactgaagaaggtgacagtcctttgggtgaccatgtgggttctctgtcagagaaattagcagcagtcgtcaataacctaaatactgggcaagtgttgcatgtggtacaggctctttacccattcagctcatctaatgatgaagaacttaatttcgagaaaggagatgtaatggatgttattgaaaaacctgaaaatgacccagagtggtggaaatgcaggaagatcaatggtatggttggtctagtaccaaaaaactatgttaccgttatgcagaataatccattaacttcaggtttggaaccatcacctccacagtgtgattacattaggccttcactcactggaaagtttgctggcaatccttggtattatggcaaagtcaccaggcatcaagcagaaatggcattaaatgaaagaggacatgaaggggatttcctcattcgtgatagtgaatcttcgccaaatgatttctcagtatcactaaaagcacaagggaaaaacaagcattttaaagtccaactaaaagagactgtctactgcattgggcagcgtaaattcagcaccatggaagaacttgtagaacattacaaaaaggcaccaatttttacaagtgaacaaggagaaaaattatatcttgtcaagcatttatcatgatactgctgaccagaagtgactgctgtgtagctgtaatttgtcatgtaattgaattgaagactgagaaaatgttgggtccagtcgtgcttgattggaaattgttgtttctaaatctatatgagaattgacaataagtatttttattataactcagcccatacatatatactatgtatgcagtgcatctgcatagaacagttccttatccttggccttctgttttattgtttttttctttgctgttttccctttgcttctaatattacagttttgtattttgtaaacaaaaatcaaataatgcatatcagaatctttatatggaagaaatcctttattgcctttcctttgtttccttgtaaaggcaccctgttctgttatggtttttcattatataaaattattatatctataaaaaaaaaaaa

SEQ ID NO: 11 - DNA, 865 bp, Homo sapiens
  CDS (46)..(810)
tactactactaaattcgcggccggtacgacggctgcggcgggaagatggcggagctgcgcgtgctcgtagctgtcaagagggtcatcgactacgccgtgaagatccgagtgaagcctgacaggaccggtgtggtcacggatggtgtgaagcactccatgaaccccttctgtgagatcgcggtggaggaggctgtgcggctcaaggagaagaagctggtgaaggaggtcatcgccgtcagctgtgggcctgcacagtgccaggagacgattcgtaccgccctggccatgggtgcagaccgaggtatccacgtggaggtgcccccagcagaagcagaacgcttgggtcccctgcaggtggctcgggtcctggccaagctggcagagaaggagaaggtggacctggtgctgctgggcaaacaggccatcgatgatgactgtaaccagacagggcagatgacagctggatttcttgactggccacagggcacattcgcctcccaggtgatgctggagggggacaagttgaaagtggagcgggagatcgatgggggcctggagaccctgcgcctgaagctgccagctgtggtgacagctgacctgaggctcaacgagccccgctacgccacgctgcccaacatcatgaaagccaagaagaagaagatcgaggtgatcaagcctggggacctgggtgtggacctgacctccaagctctctgtgatcagtgtggaggacccgccccagcgcacggccggcgtcaaggtggagaccactgaggacctggtggccaagctgaaggagattgggcggatttgagcccctcccagagatggcaataaaactgactctcaacatcaaaaaaaaaaaa

SEQ ID NO: 12 - DNA, 1989 bp, Homo sapiens
  CDS (330)..(1442)
gtccctgggccggggctcgcgctggccggctgcagcgcgcagggtgccaagccctcccctacgaagtctgttttgtctcaggctgggctgagtcacatagaatagatagatagttgatttagcacatgtcctccagatcatattatccgcctacaaatatagcctgttagcgcacaggcacgggaggcttcttccggctcggccgtgctgctcagcgggtgtaaacagcctctgcggtgtaaacagcctctgcggtgtaaacagccgcggcgggcaggccaggactgtcagtgcccgcccctcggggcaggtaatttcatgctcccaaaatgggacataaagtggttgtcttcgacatttctgtcatcagagccttgtgggaaactcgtgtcaagaagcacaaagcttggcagaagaaggaggtggaaaggcttgagaagagcgccttggagaagataaaggaggagtggaactttgtggccgaatgcaggaggaagggcatcccccaggctgtatactgcaagaatggcttcatagacaccagcgtgcggcttctggacaagattgaaaggaacactctcacaaggcagagttcacttcccaaggacagaggcaaacggagcagtgcgtttgtgtttgaactttctggggagcactggacggagctcccagattcattgaaggagcagacacacctgagagaatggtacataagcaataccttgattcaaatcattcctacatatattcagttatttcaagcgatgagaattctggatctgccaaaaaaccaaatctcacatcttccagcagaaatcggttgtttgaagaacctgaaagaactcaatgtgggtttcaactatctgaagagcattcctccagaattgggagattgtgaaaatctagagagactggattgttctggaaatctagaattaatggagctgccctttgaattaagtaatttgaagcaagttacatttgtagatatctcagcaaacaagttttccagtgtcccaatctgtgtcctgcggatgtcgaatttgcagtggttggatatcagcagcaataacctgaccgacctgccgcaagatatagacaggctagaggagctgcagagctttctcttgtataaaaacaagttgacctaccttccctattccatgctgaacctgaagaagctcactctgttagtcgtcagtggggaccatttggtggagctcccaactgccctttgtgactcatccacacctttaaaatttgtaagccttatggacaatcctattgataatgcccaatgtgaagatggcaatgaaataatggaaagtgaacgggatcgccaacattttgataaagaagttatgaaagcctatattgaagaccttaaagaaagagaatctgttcccagctataccaccaaagtgtcttttagccttcaactttgatatccatcagaagactgcaaatctcactattctctggagctatatataaatctttgttatgatcatgtcatataggaagaatggcttgtgcttaaggacaaagtctagaaaccactatcatagttgctaaaaaaaatggttttcaaatgtcaaatacatgagtatctccctccatggactggagaattgaaaaattggtttgtatattgatatttccaggttcatttgcatatacttttttccaaataatgcacatttaatatgttttaaaatgtcttatttttaagaattataactaaaagaccaaatactgaagttaagtgcattgttttcaggaatcaaaagataaaggggccgggtgtggtggctcacacctgtaatcccagcactttgggaggccgaagtgggtggatcacctgaggtccggagttcgaggctggtttggccagcatggcgaaaccccatctctactaaaaatacaaaaaattagctgggcatggtggcagttgcctgtaatcctagctactcaggaggctgaggcagg

SEQ ID NO: 13 - DNA, 549 bp, Homo sapiens
  CDS (156)..(503)
cacgcgtccggcctggttctaggaataatgggggaagtatgtaggagttgaagattagtccgccgtagtcggtgtactcgtaggttcagtaccattggtggccaattgatttgatggtaagggagggatcgttgacctcgtctgttatgtaaaggatgcgtagggatgatagcgctcacgcaagcatggttaacgtccctaaaacccgccggactttctgtaagaagtgtggcaagcaccaaccccataaagtgacacagtacaagaagggcaaggattctctgtacgcccagggaaagcggcgttatgacaggaagcagagtggctatggtgggcaaactaagccgattttccggaaaaaggctaaaactacaaagaagattgtgctaaggcttgagtgcgttgagcccaactgcagatctaagagaatgctggctattaaaagatgcaagcattttgaactgggaggagataagaagagaaagggccaagtgatccagttctaagtgtcatcttttattatgaagacaataaaatcttgagtttatg

SEQ ID NO: 14 - DNA, 1383 bp, Homo sapiens
  CDS (1)..(1158)
atggagctgaaagccaaggctcgagaactacgtgaagaatgcagaagcctcaggagccgatgcgatcaactggaagaaagggtatcagtgatggaaaatgaaatgaatgaaatgaagcgagaagggaagtttagagaaaaaagaataaaaagaaacgaacaaagccttcaagaaatatgggactatgtgaaaagaccaaatctacatctgattggtgtacctgaaagtgacggggagaatggaaccaagttggaaaacactctgcaggatattatccaggagaacttccccaatctagcaaggcaggccaacattcagattcaggaaatacagagaacgccacaaagatactcctcgagaagagcaactccaagacacataattgtcagaatcaccaaagtggaaatgaaggaaaaaatgttaagggcagccagagagaaaggtcgggttccccacaaagggaagcccatcagactaacagcggatctctcgtcagaaactctacaagccagaagagagtgggggccaatattcaacattcttaaaagaattttcagctttccacagcgcgggggaacgggaggccgcaggatggtcaagctgacggcggagctgatcgagcaggcggcgcagtacaccagcgcggtgcgcgaccgggagctggacctccgggggtataaaattcccgtcattgaaaatctaggtgctacgttagaccagtttgatgctattgatttttctgacaatgagatcaggaaactggatggttttcctttgttgagaagactgaaaacgttgttagtgaacaaaacagaatatgccagtactggatttccagaaagtgaaactaaagagcgtcaggaagcagagaaaatgttcaagggcaaacggggtgcacagcttgcaaaggatattgccaggagaagcaaaacttttaatccaggtgctggtttgccaactgacaaaaagaaaggtgggccatctccaggggatgtagaagcaatcaagaatgccatagcaaatgcttcaactctggctgaagtggagaggctgaaggggttgctgcagtctggtcagatccctggcagagaacgcagatcagggcccactgatgatggtgaagaagagatggaagaagacacagtcacaaacgggtcctgagcagtgaggcagatgtataataataggccctcttggaacaagtcttgcttttcgaacatggtataatagccttgtttgtgttagcaaagtggaatctatcagcattgttgaaatgcttaagactgctgctgataattttgtaatataagttttgaaatctaaatgtcaattttctacaaattataaaaataaactccactcactatgctaccaaaaaaaaaa

SEQ ID NO: 15 - DNA, 5933 bp, Homo sapiens
  CDS (1)..(3717)
atggcggccgccttcggccacggcggaggactcgctttcccaggggcccccgcggtcgcaggggcaacgagcccggccggccctcgcgagcggaggcggggccggggccggaagtcacgtgctgtgacagtagctggggtgaggccgtcgtcgccgcacgggctggttggggctgtgtctgtgggaggcgccggggtgatggcggtggagactctgtccccggactgggagtttgaccgcgttgacgacggctcgcagaaaattcatgccgaagtccaacttaagaattatgggaaatttcttgaggagtatacctctcaactgagaagaattgaggacgctctggatgactcaattggagatgtttgggatttcaatcttgatcctatagcattaaagcttttgccttatgaacagtcctctcttttggaactcataaagactgaaaacaaggtcttaaacaaagtcatcactgtttatgctgcactttgttgtgaaatcaagaaattaaaatatgaggctgaaactaaattttacaatggtctcttgttttatggagaaggagctacagatgccagcatggtggaaggtgattgccaaattcaaatggggagatttatttcattcttacaggaactgtcttgctttgttacgaggtgctatgaagtggtgatgaacgtagtccaccagttggctgccctctatatcagtaacaagattgcacccaaaattatagagacaactggagttcattttcagactatgtatgagcacttgggagaactgctaacagttttgctcaccctggatgaaattattgataatcatatcacactgaaagaccactggactatgtacaaaaggttactgaaatctgtccatcacaatccttcaaaatttggaattcaggaagaaaaattaaagccatttgaaaagttcttgctgaagctagaagggcaattactggatggaatgatattccaggcctgtatagaacaacaatttgattctctcaatggaggagtatctgtgtcaaaaaatagtacttttgctgaggaatttgcacatagtattcggtcaatttttgcaaatgtagaagccaaacttggagaaccttctgaaattgaccagagagacaagtatgttggaatttgtggactctttgtattgcactttcagatttttcgaactattgataaaaagttttataagtctttattggacatttgtaagaaggtaccagccatcactctaactgctaatattatttggtttcctgataattttctgatccagaaaataccagcagctgccaaactgctagacagaaaaagtcttcaagccattaaaatacacagggatacttttctacaacagaaagctcaatcacttaccaaagatgtacagtcttactacgtctttgtgagctcatggatgatgaaaatggaatctattttgtctaaagagcagagaatggataaatttgctgaagatctcaccaatagatgtaatgtttttatacagggcttcttgtatgcatatagtattagtaccattattaaaaccacaatgaatctctacatgtccatgcaaaagccaatgaccaaaacctcagttaaggcattgtgcaggcttgttgaacttctcaaggcaatagagcatatgttctacaggagaagcatggttgtggctgattcagtttcacatataacacagcaccttcaacatcaggctcttcattctatttctgtggccaagaaaagagtgatttctgacaaaaaatacagcgaacagcgtcttgatgtgctctctgctctagttttggctgaaaacactctaaatggaccaagcacaaagcaacggcgacttattgtttctttggcactaagtgttggcacacaaatgaaaacatttaaagatgaagaactctttccacttcaagtagtcatgaaaaaactggatcttattagtgaacttagagaacgagtccaaacacaatgtgactgttgttttttatactggcatcgagctgtcttcccaatttatttagatgatgtatatgaaaatgctgttgatgcagccagattacattacatgttcagtgctttgcgcgactgtgtacctgctatgatgcatgcaaggcatttagagtcctatgagatacttctggattgctatgacaaggaaattatggaaattttaaatgagcatttgctggacaaattatgcaaagaaatagagaaagatctgcgactttctgtgcatactcatttaaagctggatgaccgaaaccctttcaaagttggcatgaaagacctggctctttttttctctctgaatccaattcggtttttcaatcgtttcattgacattcgggcttacgtaactcactacctagacaagactttctacaatctaacaactgtagcccttcatgactgggccacttatagtgagatgagaaacttagctactcagcgttatggactggttatgacagaggcacatcttcccagtcagactttggaacagggccttgatgttttagaaattatgagaaacattcatatatttgtgtcccgatacctctataatctcaacaatcagatttttattgaacgaacaagcaataacaagcatttgaatactattaatattcggcatattgctaattcaattcgaacacatggcacgggaattatgaatacaactgttaatttcacctaccagtttttgaaaaagaagttctatatatttagccaatttatgtatgatgaacacatcaaatccagattgattaaagatattcgatttttcagggaaattaaggaccaaaatgatcataagtatccttttgatagagcagaaaaattcaatcgaggcatcagaaaacttggaataacacctgagggacagagctaccttgatcaattcaggcaactcatcagccagattggtaatgctatgggctatgtacgaatgataagatctggtggtcttcattgtagcagcaatgccattagatttgttcctgatcttgaagatattgtaaattttgaagaactagtaaaagaagaaggtcttgcagaagaaacattaaaagcagcaaggcatttggattcagtcctcagtgatcacacacgaaattctgccgaaggcacagaatatttcaaaatgcttgtagacgtttttgctccagaatttcgaaggccaaagaatatacatctccgaaatttctatataattgttccccctctgaccctcaactttgtagagcattccattagttgcaaggaaaaattaaataaaaaaaataaaattggagctgcctttactgatgatggctttgccatgggtgtggcttacattctaaagcttttggatcagtatcgggagtttgattcacttcactggttccagtctgttagagagaaatacctgaaggagataagagcagttgctaagcaacagaatgtacagtcagccagtcaagatgaaaaactcttacaaaccatgaatctcactcagaagcgactggatgtctatctacaggaatttgaattgctgtatttctcactgagcagtgcaagaattttcttcagagcagacaagactgcggctgaagaaaaccaagaaaagaaagagaaggaagaagaaactaaaacaagcaatggagacctgtctgacagcactgtgtctgctgatcctgttgtgaaatgatacggatggtattcactgcacatatgatgaaatcatcagaattgttaaaacttttgccagtggaatggataaactattgatgaattgtttcctgggtcacatctctggaaaatagatgttacagttcttaaaggcagtgctttaaagtgaagttcattctgtttccaaaggctctactttcaaaggttaagaatgagattttaaaattggatttttgcctggacttgagggtacaagatgtttctatttgaagtgaagttataaaagggcaaatccagattcataaactatcacctcggatttcttgtaatctacatgtttgtaatttgtatttgcatagatctttgatctatagttatttcaagtcatgggaaattcaatgcatatagtatatacagccagtaaatacatgcttaacaaaaggaatgagcctgaagttcataaagaatacatatcaatattcttataaaaggaatatatgaagatggctttgatactagaggtgaggcacaagtgttttatgtactctcagtgtacagtataactgatgatccttctttcattgttaatttcatgtgactcacaagagctgctgatgtctttgatgagacattttataactagtttacattgctttgagaacatttaacctccaacagctgctttaaatttaagatttacttaatactcagaaaattcagataaagccatagagtcctgtttgaagcttcacttctattttggttgaaggcatgatgtatgatgtcagaaaaaaaattgaatgaattatttctacatccaaactcaggtttcttctacattagattgaattgaaattttggtgatggtttgggtagactttttttttatatcaagtataatttaaaacatcagattaaataattacactgttcaggcttttaaaaaaataccactgtgagaataaagcgctagtaagatacatcacttactgattttaaaaatacagaaagattttgagtaaattttgtgcccagcaagctgttagttttatttttgtaaaggtatgtaagttattaaatggttaatcatggccttttaaaaataaaataaagtgatacctttacaatgaagacaaaagtttaaaactttctaatacaaacaccattttgggaaatgcttgatttttttctattgcatttgtctgctaaacatttctttggataaatcctgcaaatacttctaacattattctttgattccagcttttagaatgggtgtacaatgccctgtttgtacttactggttagggtcagggtaacttgccagcccaagataaatactttaatcgttaaaagtcagaagagacagaatatgtaggaaatgttttttgtttattatgtaaacatggcttacagaattatgaacagtggatagattaaaggcatttaatatttgtaattcataataactgtagaaatggccctaaagcatgctgcataattaataatttatattttcattattataagtgtttatattaatgatcttgcatttgattatatcaaattcgtcatttcatagcaacagtattgttttctctgtttttcttctctaacttctctgaaatcatctcctattaagggatagaaattgttactagaagagaatcacatgttctgtgttcattatccctacacatgtaaattaattattttatcaatactagatagagttcacatgctgactccctggatacctacagttgagaagaaaatgacagacaattatttttcctttaggtcaaaataatgtcactgctatctggataaattataagttcatatatttgaaataagatcctggaaacgaatttaaatggtgtcaaactgcagagcaacagggcttcagtatattcacatctaataggttaatatgtacatttggatgatgatttttcttgataacattaacattaattttattttttcagacatactgtaatttaaaaattaatgtgagcgtttgttttaagttcacagaaaacttaataattcaaattctcaggaattaaggactcaccataacattgtcagttccaatgaaattttgtaaaagatggcaagtttgttacctcacttgagtggggttttccttttcccccaattctaagagaatataatgtgtatactaaaacattaataaacataattttgaaaatttcaaaaaaaaaa

SEQ ID NO: 16 - DNA, 762 bp, Homo sapiens
  CDS (236)..(616)
tctgcctaagaagtccaaggctaaagaataagccttagccctccgcgtgcccgcgggtctgtctcttgcttcaacagtgtttggacggaacagatccggggactctcttccagcctccgaccgccctccgatttcctctccgcttgcaacctccgggaccatcttctcggccatctcctgcttctgggacctgccagcaccgtttttgtggttagctccttcttgccaaccaaccatgagctcccagattcgtcagaattattccaccgacgtggaggcagccgtcaacagcctggtcaatttgtacctgcaggcctcctacacctacctctctctgggcttctatttcgaccgcgatgatgtggctctggaaggcgtgagccacttcttccgcgaattggccgaggagaagcgcgagggctacgagcgtctcctgaagatgcaaaaccagcgtggcggccgcgctctcttccaggacatcaagaagccagctgaagatgagtggggtaaaaccccagacgccatgaaagctgccatggccctggagaaaaagctgaaccaggcccttttggatcttcatgccatgggttctgcccgcacggacccccatctcatgtgacttcctggagcctcacttcatagatgaggaagtgaagcttatcaagaagatgggggaccacctgtccatcctacacaggctgggtggcgcgcaggctgggctgggcgagtatctctcagtaaggctcgctctcaagcacagat

SEQ ID NO: 17 - DNA, 1362 bp, Homo sapiens
  CDS (259)..(1182)
cgcttatttggagactagaggagtgacaatccactttaataatccagcttcagctcagctgagaacttcccctctcaggtgcaaagggatggcagagaagtctttccaagagggctcaatccactaagagattatggcttagagaagggaacagctcaaagaagcccttgaagagggtgagggtctggaggactcctgtggtgcaggccatctcccggatagagtgccggacgcgtgggctggtgagaagacagcgaaatggcgcctccggcccccggcccggcctccggcggctccggggaggtagacgagctgttcgacgtaaagaacgccttctacatcggcagctaccagcagtgcataaacgaggcgcagcgggtgaagctatcaagcccagagagagacgtggagagggacgtcttcctgtatagagcgtacctggcgcagaggaagttcggtgtggtcctggatgagatcaagccctcctcggcccctgagctccaggccgtgcgcatgtttgctgactacctcgcccacgagagtcggagggacagcatcgtggccgagctggaccgagagatgagcaggagcgtggacgtgaccaacaccaccttcctgctcatggccgcctccatctatctccacgaccagaacccggatgccgccctgcgtgcgctgcaccagggggacagcctggagtgcacagccatgacagtgcagatcctgctgaagctggaccgcctggacctcgcccggaaggagctgaagagaatgcaggacctggacgaggatgccaccctcacccagctcgccactgcctgggtcagcctggccacgggtggtgagaagctgcaggatgcctactacatcttccaggagatggctgacaagtgctcgcccaccctgctgctgctcaatgggcaggcggcctgccacatggcccagggccgctgggaggccgctgagggcctgctgcaggaggcgctagacaaggatagtggctacccggagacgctggtcaacctcatcgtcctgtcccagcacctgggcaagccccctgaggtgacaaaccgatacctgtcccagctgaaggatgcccacaggtcccatcccttcatcaaggagtaccaggccaaggagaacgactttgacaggctggtgctacagtacgctcccagcgcctgaggctggcccagagctgtcaggaccatgaagccaggacagaggccaggagccagccctgcagccctccccacccggcatccacctgcatcccctctgggggcaggagcccacccccagcacccccatctgttaataaatatctcaactccagggtgttccacctgaaaaaaaaaaaaa

SEQ ID NO: 18 - DNA, 12505 bp, Homo sapiens
  CDS (197)..(9964)
ctaccgggcggaggtgagcgcggcgccggctcctcctgcggcggactttgggtgcgacttgacgagcggtggttcgacaagtggccttgcgggccggatcgtcccagtggaagagttgtaaatttgcttctggccttcccctacggattatacctggccttcccctacggattatactcaacttactgtttagaaaatgtggcccacgagacgcctggttactatcaaaaggagcggggtcgacggtccccactttcccctgagcctcagcacctgcttgtttggaaggggtattgaatgtgacatccgtatccagcttcctgttgtgtcaaaacaacattgcaaaattgaaatccatgagcaggaggcaatattacataatttcagttccacaaatccaacacaagtaaatgggtctgttattgatgagcctgtacggctaaaacatggagatgtaataactattattgatcgttccttcaggtatgaaaatgaaagtcttcagaatggaaggaagtcaactgaatttccaagaaaaatacgtgaacaggagccagcacgtcgtgtctcaagatctagcttctcttctgaccctgatgagaaagctcaagattccaaggcctattcaaaaatcactgaaggaaaagtttcaggaaatcctcaggtacatatcaagaatgtcaaagaagacagtaccgcagatgactcaaaagacagtgttgctcagggaacaactaatgttcattcctcagaacatgctggacgtaatggcagaaatgcagctgatcccatttctggggattttaaagaaatttccagcgttaaattagtgagccgttatggagaattgaagtctgttcccactacacaatgtcttgacaatagcaaaaaaaatgaatctcccttttggaagctttatgagtcagtgaagaaagagttggatgtaaaatcacaaaaagaaaatgtcctacagtattgtagaaaatctggattacaaactgattacgcaacagagaaagaaagtgctgatggtttacagggggagacccaactgttggtctcgcgtaagtcaagaccaaaatctggtgggagcggccacgctgtggcagagcctgcttcacctgaacaagagcttgaccagaacaaggggaagggaagagacgtggagtctgttcagactcccagcaaggctgtgggcgccagctttcctctctatgagccggctaaaatgaagacccctgtacaatattcacagcaacaaaattctccacaaaaacataagaacaaagacctgtatactactggtagaagagaatctgtgaatctgggtaaaagtgaaggcttcaaggctggtgataaaactcttactcccaggaagctttcaactagaaatcgaacaccagctaaagttgaagatgcagctgactctgccactaagccagaaaatctctcttccaaaaccagaggaagtattcctacagatgtggaagttctgcctacggaaactgaaattcacaatgagccatttttaactctgtggctcactcaagttgagaggaagatccaaaaggattccctcagcaagcctgagaaattgggcactacagctggacagatgtgctctgggttacctggtcttagttcagttgatatcaacaactttggtgattccattaatgagagtgagggaatacctttgaaaagaaggcgtgtgtcctttggtgggcacctaagacctgaactatttgatgaaaacttgcctcctaatacgcctctcaaaaggggagaagccccaaccaaaagaaagtctctggtaatgcacactccacctgtcctgaagaaaatcatcaaggaacagcctcaaccatcaggaaaacaagagtcaggttcagaaatccatgtggaagtgaaggcacaaagcttggttataagccctccagctcctagtcctaggaaaactccagttgccagtgatcaacgccgtaggtcctgcaaaacagcccctgcttccagcagcaaatctcagacagaggttcctaagagaggaggagaaagagtggcaacctgccttcaaaagagagtgtctatcagccgaagtcaacatgatattttacagatgatatgttccaaaagaagaagtggtgcttcggaagcaaatctgattgttgcaaaatcatgggcagatgtagtaaaacttggtgcaaaacaaacacaaactaaagtcataaaacatggtcctcaaaggtcaatgaacaaaaggcaaagaagacctgctactccaaagaagcctgtgggcgaagttcacagtcaatttagtacaggccacgcaaactctccttgtaccataataatagggaaagctcatactgaaaaagtacatgtgcctgctcgaccctacagagtgctcaacaacttcatttccaaccaaaaaatggactttaaggaagatctttcaggaatagctgaaatgttcaagaccccagtgaaggagcaaccgcagttgacaagcacatgtcacatcgctatttcaaattcagagaatttgcttggaaaacagtttcaaggaactgattcaggagaagaacctctgctccccacctcagagagttttggaggaaatgtgttcttcagtgcacagaatgcagcaaaacagccatctgataaatgctctgcaagccctcccttaagacggcagtgtattagagaaaatggaaacgtagcaaaaacgcccaggaacacctacaaaatgacttctctggagacaaaaacttcagatactgagacagagccttcaaaaacagtatccactgtaaacaggtcaggaaggtctacagagttcaggaatatacagaagctacctgtggaaagtaagagtgaagaaacaaatacagaaattgttgagtgcatcctaaaaagaggtcagaaggcaacactactacaacaaaggagagaaggagagatgaaggaaatagaaagaccttttgagacatataaggaaaatattgaattaaaagaaaacgatgaaaagatgaaagcaatgaagagatcaagaacttgggggcagaaatgtgcaccaatgtctgacctgacagacctcaagagcttgcctgatacagaactcatgaaagacacggcacgtggccagaatctcctccaaacccaagatcatgccaaggcaccaaagagtgagaaaggcaaaatcactaaaatgccctgccagtcattacaaccagaaccaataaacaccccaacacacacaaaacaacagttgaaggcatccctggggaaagtaggtgtgaaagaagagctcctagcagtcggcaagttcacacggacgtcaggggagaccacgcacacgcacagagagccagcaggagatggcaagagcatcagaacgtttaaggagtctccaaagcagatcctggacccagcagcccgtgtaactggaatgaagaagtggccaagaacgcctaaggaagaggcccagtcactagaagacctggctggcttcaaagagctcttccagacaccaggtccctctgaggaatcaatgactgatgagaaaactaccaaaatagcctgcaaatctccaccaccagaatcagtggacactccaacaagcacaaagcaatggcctaagagaagtctcaggaaagcagatgtagaggaagaattcttagcactcaggaaactaacaccatcagcagggaaagccatgcttacgcccaaaccagcaggaggtgatgagaaagacattaaagcatttatgggaactccagtgcagaaactggacctggcaggaactttacctggcagcaaaagacagctacagactcctaaggaaaaggcccaggctctagaagacctggctggctttaaagagctcttccagactcctggtcacaccgaggaattagtggctgctggtaaaaccactaaaataccctgcgactctccacagtcagacccagtggacaccccaacaagcacaaagcaacgacccaagagaagtatcaggaaagcagatgtagagggagaactcttagcgtgcaggaatctaatgccatcagcaggcaaagccatgcacacgcctaaaccatcagtaggtgaagagaaagacatcatcatatttgtgggaactccagtgcagaaactggacctgacagagaacttaaccggcagcaagagacggccacaaactcctaaggaagaggcccaggctctggaagacctgactggctttaaagagctcttccagacccctggtcatactgaagaagcagtggctgctggcaaaactactaaaatgccctgcgaatcttctccaccagaatcagcagacaccccaacaagcacaagaaggcagcccaagacacctttggagaaaagggacgtacagaaggagctctcagccctgaagaagctcacacagacatcaggggaaaccacacacacagataaagtaccaggaggtgaggataaaagcatcaacgcgtttagggaaactgcaaaacagaaactggacccagcagcaagtgtaactggtagcaagaggcacccaaaaactaaggaaaaggcccaacccctagaagacctggctggctggaaagagctcttccagacaccagtatgcactgacaagcccacgactcacgagaaaactaccaaaatagcctgcagatcacaaccagacccagtggacacaccaacaagctccaagccacagtccaagagaagtctcaggaaagtggacgtagaagaagaattcttcgcactcaggaaacgaacaccatcagcaggcaaagccatgcacacacccaaaccagcagtaagtggtgagaaaaacatctacgcatttatgggaactccagtgcagaaactggacctgacagagaacttaactggcagcaagagacggctacaaactcctaaggaaaaggcccaggctctagaagacctggctggctttaaagagctcttccagacacgaggtcacactgaggaatcaatgactaacgataaaactgccaaagtagcctgcaaatcttcacaaccagacctagacaaaaacccagcaagctccaagcgacggctcaagacatccctggggaaagtgggcgtgaaagaagagctcctagcagttggcaagctcacacagacatcaggagagactacacacacacacacagagccaacaggagatggtaagagcatgaaagcatttatggagtctccaaagcagatcttagactcagcagcaagtctaactggcagcaagaggcagctgagaactcctaagggaaagtctgaagtccctgaagacctggccggcttcatcgagctcttccagacaccaagtcacactaaggaatcaatgactaatgaaaaaactaccaaagtatcctacagagcttcacagccagacctagtggacaccccaacaagctccaagccacagcccaagagaagtctcaggaaagcagacactgaagaagaatttttagcatttaggaaacaaacgccatcagcaggcaaagccatgcacacacccaaaccagcagtaggtgaagagaaagacatcaacacgtttttgggaactccagtgcagaaactggaccagccaggaaatttacctggcagcaatagacggctacaaactcgtaaggaaaaggcccaggctctagaagaactgactggcttcagagagcttttccagacaccatgcactgataaccccacagctgatgagaaaactaccaaaaaaatactctgcaaatctccgcaatcagacccagcggacaccccaacaaacacaaagcaacggcccaagagaagcctcaagaaagcagacgtagaggaagaatttttagcattcaggaaactaacaccatcagcaggcaaagccatgcacacgcctaaagcagcagtaggtgaagagaaagacatcaacacatttgtggggactccagtggagaaactggacctgctaggaaatttacctggcagcaagagacggccacaaactcctaaagaaaaggccaaggctctagaagatctggctggcttcaaagagctcttccagacaccaggtcacactgaggaatcaatgaccgatgacaaaatcacagaagtatcctgcaaatctccacaaccagacccagtcaaaaccccaacaagctccaagcaacgactcaagatatccttggggaaagtaggtgtgaaagaagaggtcctaccagtcggcaagctcacacagacgtcagggaagaccacacagacacacagagagacagcaggagatggaaagagcatcaaagcgtttaaggaatctgcaaagcagatgctggacccagcaaactatggaactgggatggagaggtggccaagaacacctaaggaagaggcccaatcactagaagacctggccggcttcaaagagctcttccagacaccagaccacactgaggaatcaacaactgatgacaaaactaccaaaatagcctgcaaatctccaccaccagaatcaatggacactccaacaagcacaaggaggcggcccaaaacacctttggggaaaagggatatagtggaagagctctcagccctgaagcagctcacacagaccacacacacagacaaagtaccaggagatgaggataaaggcatcaacgtgttcagggaaactgcaaaacagaaactggacccagcagcaagtgtaactggtagcaagaggcagccaagaactcctaagggaaaagcccaacccctagaagacttggctggcttgaaagagctcttccagacaccagtatgcactgacaagcccacgactcacgagaaaactaccaaaatagcctgcagatctccacaaccagacccagtgggtaccccaacaatcttcaagccacagtccaagagaagtctcaggaaagcagacgtagaggaagaatccttagcactcaggaaacgaacaccatcagtagggaaagctatggacacacccaaaccagcaggaggtgatgagaaagacatgaaagcatttatgggaactccagtgcagaaattggacctgccaggaaatttacctggcagcaaaagatggccacaaactcctaaggaaaaggcccaggctctagaagacctggctggcttcaaagagctcttccagacaccaggcactgacaagcccacgactgatgagaaaactaccaaaatagcctgcaaatctccacaaccagacccagtggacaccccagcaagcacaaagcaacggcccaagagaaacctcaggaaagcagacgtagaggaagaatttttagcactcaggaaacgaacaccatcagcaggcaaagccatggacaccccaaaaccagcagtaagtgatgagaaaaatatcaacacatttgtggaaactccagtgcagaaactggacctgctaggaaatttacctggcagcaagagacagccacagactcctaaggaaaaggctgaggctctagaggacctggttggcttcaaagaactcttccagacaccaggtcacactgaggaatcaatgactgatgacaaaatcacagaagtatcctgtaaatctccacagccagagtcattcaaaacctcaagaagctccaagcaaaggctcaagatacccctggtgaaagtggacatgaaagaagagcccctagcagtcagcaagctcacacggacatcaggggagactacgcaaacacacacagagccaacaggagatagtaagagcatcaaagcgtttaaggagtctccaaagcagatcctggacccagcagcaagtgtaactggtagcaggaggcagctgagaactcgtaaggaaaaggcccgtgctctagaagacctggttgacttcaaagagctcttctcagcaccaggtcacactgaagagtcaatgactattgacaaaaacacaaaaattccctgcaaatctcccccaccagaactaacagacactgccacgagcacaaagagatgccccaagacacgtcccaggaaagaagtaaaagaggagctctcagcagttgagaggctcacgcaaacatcagggcaaagcacacacacacacaaagaaccagcaagcggtgatgagggcatcaaagtattgaagcaacgtgcaaagaagaaaccaaacccagtagaagaggaacccagcaggagaaggccaagagcacctaaggaaaaggcccaacccctggaagacctggccggcttcacagagctctctgaaacatcaggtcacactcaggaatcactgactgctggcaaagccactaaaataccctgcgaatctcccccactagaagtggtagacaccacagcaagcacaaagaggcatctcaggacacgtgtgcagaaggtacaagtaaaagaagagccttcagcagtcaagttcacacaaacatcaggggaaaccacggatgcagacaaagaaccagcaggtgaagataaaggcatcaaagcattgaaggaatctgcaaaacagacaccggctccagcagcaagtgtaactggcagcaggagacggccaagagcacccagggaaagtgcccaagccatagaagacctagctggcttcaaagacccagcagcaggtcacactgaagaatcaatgactgatgacaaaaccactaaaataccctgcaaatcatcaccagaactagaagacaccgcaacaagctcaaagagacggcccaggacacgtgcccagaaagtagaagtgaaggaggagctgttagcagttggcaagctcacacaaacctcaggggagaccacgcacaccgacaaagagccggtaggtgagggcaaaggcacgaaagcatttaagcaacctgcaaagcggaacgtggacgcagaagatgtaattggcagcaggagacagccaagagcacctaaggaaaaggcccaacccctggaagacctggccagcttccaagagctctctcaaacaccaggccacactgaggaactggcaaatggtgctgctgatagctttacaagcgctccaaagcaaacacctgacagtggaaaacctctaaaaatatccagaagagttcttcgggcccctaaagtagaacccgtgggagacgtggtaagcaccagagaccctgtaaaatcacaaagcaaaagcaacacttccctgcccccactgcccttcaagaggggaggtggcaaagatggaagcgtcacgggaaccaagaggctgcgctgcatgccagcaccagaggaaattgtggaggagctgccagccagcaagaagcagagggttgctcccagggcaagaggcaaatcatccgaacccgtggtcatcatgaagagaagtttgaggacttctgcaaaaagaattgaacctgcggaagagctgaacagcaacgacatgaaaaccaacaaagaggaacacaaattacaagactcggtccctgaaaataagggaatatccctgcgctccagacgccaagataagactgaggcagaacagcaaataactgaggtctttgtattagcagaaagaatagaaataaacagaaatgaaaagaagcccatgaagacctccccagagatggacattcagaatccagatgatggagcccggaaacccatacctagagacaaagtcactgagaacaaaaggtgcttgaggtctgctagacagaatgagagctcccagcctaaggtggcagaggagagcggagggcagaagagtgcgaaggttctcatgcagaatcagaaagggaaaggagaagcaggaaattcagactccatgtgcctgagatcaagaaagacaaaaagccagcctgcagcaagcactttggagagcgaatctgtgcagagagtaacgcggagtgtcaagaggtgtgcagaaaatccaaagaaggctgaggacaatgtgtgtgtcaagaaaataagaaccagaagtcatagggacagtgaagatatttgacagaaaaatcgaactgggaaaaatataataaagttagttttgtgataagttctagtgcagtttttgtcataaattacaagtgaattctgtaagtaaggctgtcagtctgcttaagggaagaaaactttggatttgctgggtctgaatcggcttcataaactccactgggagcactgctgggctcctggactgagaatagttgaacaccgggggctttgtgaaggagtctgggccaaggtttgccctcagctttgcagaatgaagccttgaggtctgtcaccacccacagccaccctacagcagccttaactgtgacacttgccacactgtgtcgtcgtttgtttgcctatgtcctccagggcacggtggcaggaacaactatcctcgtctgtcccaacactgagcaggcactcggtaaacacgaatgaatggatgagcgcacggatgaatggagcttacaagatctgtctttccaatggccgggggcatttggtccccaaattaaggctattggacatctgcacaggacagtcctatttttgatgtcctttcctttctgaaaataaagttttgtgctttggagaatgactcgtgagcacatctttagggaccaagagtgactttctgtaaggagtgactcgtggcttgccttggtctcttgggaatacttttctaactagggttgctctcacctgagacattctccacccgcggaatctcagggtcccaggctgtgggccatcacgacctcaaactggctcctaatctccagctttcctgtcattgaaagcttcggaagtttactggctctgctcccgcctgttttctttctgactctatctggcagcccgatgccacccagtacaggaagtgacaccagtactctgtaaagcatcatcatccttggagagactgagcactcagcaccttcagccacgatttcaggatcgcttccttgtgagccgctgcctccgaaatctcctttgaagcccagacatctttctccagcttcagacttgtagatataactcgttcatcttcatttactttccactttgccccctgtcctctctgtgttccccaaatcagagaatagcccgccatcccccagatcacctgtctggattcctccccattcacccaccttgccaggtgcaggtgaggatggtgcaccagacagggtagctgtcccccaaaatgtgccctgtgcgggcagtgccctgtctccacgtttgtttccccagtgtctggcggggagccaggtgacatcataaatacttgctgaatgaatgcagaaatcagcggtactgacttgtactatattggctgccatgatagggttctcacagcgtcatccatgatcgtaagggagaatgacattctgcttgagggagggaatagaaaggggcagggaggggacatctgagggcttcacagggctgcaaagggtacagggattgcaccagggcagaacaggggagggtgttcaaggaagagtggctcttagcagaggcactttggaaggtgtgaggcataaatgcttccttctacgtaggccaacctcaaaactttcagtaggaatgttgctatgatcaagttgttctaacactttagacttagtagtaattatgaacctcacatagaaaaatttcatccagccatatgcctgtggagtggaatattctgtttagtagaaaaatcctttagagttcagctctaaccagaaatcttgctgaagtatgtcagcaccttttctcaccctggtaagtacagtatttcaagagcacgctaagggtggttttcattttacagggctgttgatgatgggttaaaaatgttcatttaagggctacccccgtgtttaatagatgaacaccacttctacacaaccctccttggtactgggggagggagagatctgacaaatactgcccattcccctaggctgactggatttgagaacaaatacccacccatttccaccatggtatggtaacttctctgagcttcagtttccaagtgaatttccatgtaataggacattcccattaaatacaagctgtttttactttttcgcctcccagggcctgtgcgatctggtcccccagcctctcttgggctttcttacactaactctgtacctaccatctcctgcctcccttaggcaggcacctccaaccaccacacactccctgctgttttccctgcctggaactttccctcctgccccaccaagatcatttcatccagtcctgagctcagcttaagggaggcttcttgcctgtgggttccctcacccccatgcctgtcctccaggctggggcaggttcttagtttgcctggaattgttctgtacctctttgtagcacgtagtgttgtggaaactaagccactaattgagtttctggctcccctcctggggttgtaagttttgttcattcatgagggccgactgtatttcctggttactgtatcccagtgaccagccacaggagatgtccaataaagtatgtgatgaaatggtcttaaaaaaaaaaa

SEQ ID NO: 19 - DNA, 1309 bp, Homo sapiens
  CDS (1)..(981)
atgggcaagtgggaatttatagccaacgaatacggtggggcctatatttacaagtttttccgggtcgccgagaagggtcacgcacaggattgcgacctcgattggaacgcgcttcccgaaaggggcatgcgcagagaggtcgtagtcgcgtctgaggatgagctcgctgcatcggggctgccgagctgcgatgccgccgtcaacctggccggagagaacatcctcaaccctctccgaaggtcagcccgggccctaaagctgatacccactagagcacagggaggacagtgccccactgatgagaacctatggaatgaaaccttccaaaaagaggtaatcggcagccgcctagagaccacccaattgctggctaaagccatcaccaaagccccacaaccccccaaggcctgggtcttagtcacaggtgtagcttactaccagcccagtctgactgcggagtatgatgaagacagcccaggaggggactttgactttttctccaacctcgtaaccaaatgggaagctgcagccaggcttcctggagattctacacgccaggtggtggtgcgctcaggggttgtgctgggccgtgggggtggtgccatgggccacatgctgctgccctttcgcctgggcctggggggccccatcggctcaggccaccaattcttcccctggatacacatcggggacctggcaggaatcctgacccatgcccttgaagcaaaccacgtgcacggggtcctgaatggagtggctccatcctccgccactaatgctgagtttgcccagaccttcggtgctgccctgggccgccgagccttcatccctctccccagcgctgtggtgcaagctgtctttgggcgacagcgtgccatcatgctgctggagggccagaaggtgatcccacggcgaacactggccactggctaccagtattccttcccagagctaggggctgccttaaaggaaattgtagcctaagtaggtcatggcaagggcctgaggcctgttcctcacaggcttccaggttaggcactgtgaataggctcagctcctctagagagctgaagccatctggttcttagattcctctcccagtcctctttcccattgttctgttgctccaccttattgtctcaaggccgtaatctcatcaggttgggacattaatcttttcaactccttgtaagatttcccggtttggtttctctacatgtcctgcagctgccccacttctcctttacgctgtgtagagaatgctctgcagtttaggcaataaaaataaattgtctcactaaaaaaaaaa

SEQ ID NO: 20 - DNA, 1852 bp, Homo sapiens
  CDS (1)..(1788)
atgcctgtaatcccagctactcaggaggctgaggcagaagaatcgctcgatcctgggaggcggaggttgcgaaccattggaaagttggagccatcctacgtgatccgcaagtttctggatgcccagcgcattcacaacctgactgcctacctgcagaccctgcaccgacaatccctggccaatgccgaccataccaccctgctcctcaactgctataccaagctcaaggacagctcgaagctggaggagttcatcaagaaaaagagtgagagtgaagtccactttgatgtggagacagccatcaaggtcctccggcaggctggctactactcccatgccctgtatctggcggagaaccatgcacatcatgagtggtacctgaagatccagctagaagacattaagaattatcaggaagcccttcgatacatcggcaagctgccttttgagcaggcagagagcaacatgaagcgctacggcaagatcctcatgcaccacataccagagcagacaactcagttgctgaagggactttgtactgattatcggcccagcctcgaaggccgcagcgatagggaggccccaggctgcagggccaactctgaggagttcatccccatctttgccaataacccgcgagagctgaaagccttcctagagcacatgagtgaagtgcagccagactcaccccaggggatctacgacacactccttgagctgcgactgcagaactgggcccacgagaaggatccacaggtcaaagagaagcttcacgcagaggccatttccctgctgaagagtggtcgcttctgtgacgtctttgacaaggccctggtcctgtgccagatgcacgacttccaggatggtgtcctttacctttatgagcaggggaagctgttccagcagatcatgcactaccacatgcagcacgagcagtaccggcaggtcatcagcgtgtgtgagcgccatggggagcaggacccctccttgtgggagcaggccctcagctacttcgctcgcaaggaggaggactgcaaggagtatgtggcagctgtcctcaagcatatcgagaacaagaacctcatgccacctcttctaggtacttgggaagacagatgggatgagctgcgggtgcggcggtaccgagaggagaccacccgtatccgccaggagatccaagagctcaaggccagtcctaagattttccaaaagaccaagtgcagcatctgtaacagtgccttggagttgccctcagtccacttcctgtgtggccactccttccaccaacactgctttgagagttactcggaaagtgatgctgactgccccacctgcctccctgaaaaccggaaggtcatggatatgatccgggcccaggaacagaaacgagatctccatgatcaattccagcatcagccgcctaaggacgacaagaagaagaaggacgctggaaagtcggccaagaaagacaaagacccagtgaacaaatccgggggcaaggccaaaaagaagaagtggtccaaaggcaaagttcgggacaagctcaataacttagtcttgtttgacaaagctacctatgataaactctgtaaggaagttcccaactataaacttataaccccagctgtggtctctgagagactgaagattcgaggctccctggccagggcagcccttcaggagctccttagtaaaggacttatcaaactggtttcaaagcacagagctcaagtaatttacaccagaaataccaagggtggagatgctccagctgctggtgaagatgcatgaataggtccaaccagctgtacatttggaaaaataaaactttattaaatcaaaaaaaaaaaaa

SEQ ID NO: 21 - DNA, 1584 bp, Homo sapiens
  CDS (14)..(904)
gcacgaggtcaagatggcgggagcagctacccaggcttccctggagtcggccccacggatcatgcggctggtggccgaatgcagccgctccagggcccgggcaggcgagctgtggctgccgcatgggacagtggccactcctgtgttcatgccagtgggcacgcaggccaccatgaagggcatcacgaccgaacagctggacgctctgggttgccgcatctgcctgggcaatacctaccatctgggtctaaggccgggacccgagctgatccagaaagccaacggtctccacggcttcatgaattggcctcataatctgctaacggacagcggcggtttccagatggtgtcgctggtgtctctgtccgaggtgacggaggagggcgtccgcttccgctccccctacgacggcaatgagaccctgctgagcccggagaaatccgtgcagatccagaatgcgctgggctcggacatcatcatgcagctggacgacgtggttagcagtactgtgactgggccacgtgtggaggaggccatgtacaggtcaatccgctggctggaccggtgcattgcagcccatcagcggccggacaagcagaacctcttcgccattatccagggtgggctggacgcagatctccgggccacctgccttgaagagatgaccaagcgagacgtgcctggcttcgccatcgggggcctgagcgggggtgagagcaagtcgcagttctggcggatggtggcgctgagcacctctcggctgccgaaggacaagccccgatatctgatgggggttgggtatgttgtggatagggaagccagagccctacctgtgggaagtggattcctggggaccccctaccctgcttggggaggtggcatttgggggaaacggacacaggtctgatctgaggagactaggaagacatggctgtcccttgggggccattctgagggaatatggcccagtctggggcagtgtgagggttgggaggggccctgggaagcccctgaggttctctgccccctcccgtcatggctgcaaccccagctatgccactgatctggtagtctgcgtggctcttggatgtgacatgttcgactgcgtcttccccacacggacagcgcgctttggctctgccctggtgcccactgggaacctgcagttgaggaagaaggtgtttgagaaggacttcggccccatagacccggagtgcacctgccccacgtgccaaaagcacagccgcgccttcctgcacgcactgctgcacagtgacaacacggccgcgctgcaccacctcacggtccacaacatcgcctaccagctgcagctcatgagcgccgtccgcaccagcatcgtggagaagcgcttcccggacttcgtgcgggacttcatgggcgccatgtacggggatcccaccctctgtcccacctgggccactgacgctctggcctctgtgggaatcacactgggctgacctggcattgggagagggagggaggaaggaagggagggaggggctggaagatactgaaggattcctttttgaaaggttttttttattgtaacttaaaaaaaaaaaa

SEQ ID NO: 22 - DNA, 1643 bp, Homo sapiens
  CDS (600)..(1067)
ctttgtgtcaatggatttatcccactgaacaatttgaatgaagacaatgtggaatggctttgagatacagttcagtttttattaggcatcaatttgtattggtgtgaacttttcaaaatgtaaatcatatatgcagtttctttggtatgacctgtgttaactcagattcagagaatttataatgtatttttttaataacataagaaaacttttctgatattcctctagttttggattgccaaaatattcacagtagaggaaaactgagaaaacgtaggaaaccattctttatacttgcatgtaaacatcttccagcaacaatcatttattgttaaacctggaaaaagccattacacaggaaacctctgttgatataagcgatgatgggaaaggctatttagccactctgcatatttaatgctcatgatcaacatctgcttcctatagctgggatgatatgggggaagatatttatcccttctggggatcatatataaatgatgatagtagtacctacagtatagtgctgttagaattacatgagttagatgtggaggtcagagtggaagcaggtgtgagagggtcccgcagaagaaaacatggctgccaaagtgtttgagtccatcggcaagtttggcctggccttagctgttgcaggaggcatggtgaactctgccttatgtaatgtggatgctgggcacagagctgccatctttgaccaattccgtggagtacagaacattgtggtaggggaagggactcactttctcatcccatgtgtacaaaaaccaattatctttgactgctgttctcaaccacgtagtgcgccagtcatcactggtagcaaagatttacagaatgtcaacatcacactgtgcatcctcttccggcccatcactagccagcttcctcgcatcttcaccagcattggagaggactacgatgagtgtgtgctgccgttcattaccacggagatcctcaagtcactggtggctcgctttgatgctggagaactaatcacccagagggagctggtctccagccaggtgagcaacaaccttatggagtgagcagccacctttgggctcattctggacgacgtgtctttgacacatctgaccttcttgaaggagttaacagacaggtggccccccaggaagcagagagcgccagatttgtggtggaaaaggcggccatcatctctgctgagggtgactccaaggcagctgagctgatcgccaactcactggccactgcaggggacggccagagcgagctgtgcaagctggaagctgcagaagacattgcataccagctctcatgctctcggaacatcacctgcctgccggcagggcagtccgtgctcctccagctgccctagtgaggccccagcctacctgcacctccgtgaggcaactgggccacagccccgatgattcgtaacaccacctttcgccctcaccccagaaatcactgaaatttcatgattggcttaaagtgaaggaagtaaaggtaaaatcacttcagatctctaaaaaacaaagaattacatgagttagtacatgaaaaaattatgggaaactacatgaaatatactgttacgttcaataaacattagcttctgtatataataaaaaaaaaaa

SEQ ID NO: 23 - DNA, 1744 bp, Homo sapiens
  CDS (85)..(1545)
ggccggaattcccgggtcgacgatgtcgtcctgttccgggcggggttggggcggaagggctgccaggcgcccagctgtgcccagatggatgggacagagacccggcagcggaggctggacagctgtggcaagccaggggagctggggcttcctcaccccctcagcacaggaggactccctgtagcctcagaagatggagctctcagggcccctgagagccaaagcgtgacccccaagccactggagactgagcctagcagggagaccgcctggtccataggccttcaggtgaccgtgcccttcatgtttgcaggcctgggactgtcctgggccggcatgcttctggactatttccagcactggcctgtgtttgtggaggtgaaagaccttttgacattggtgccgcccctggtgggcctgaaggggaacctggagatgacactggcatccagactctccacagctgccaacactggacaaattgatgacccccaggagcagcacagagtcatcagcagcaacctggccctcatccaggtgcaggccactgtcgtggggctcttggctgctgtggctgcgctgctgttgggcgtggtgtctcgagaggaagtggatgtcgccaaggtggagttgctgtgtgccagcagtgtcctcactgccttccttgcagcctttgccctgggggtgctgatggtctgtatagtgattggtgctcgaaagctcggggtcaacccagacaacattgccacgcccattgcagccagcctgggagacctcatcacactgtccattctggctttggttagcagcttcttctacagacacaaagatagtcggtatctgacgccgctggtctgcctcagctttgcggctctgaccccagtgtgggtcctcattgccaagcagagcccacccatcgtgaagatcctgaagtttggctggttcccaatcatcctggccatggtcatcagcagtttcggaggactcatcttgagcaaaaccgtttctaaacagcagtacaaaggcatggcgatatttacccccgtcatatgtggtgttggtggcaatctggtggccattcagaccagccgaatctcaacctacctgcacatgtggagtgcacctggcgtcctgcccctccagatgaagaaattctggcccaacccgtgttctactttctgcacgtcagaaatcaattccatgtcagctcgagtcctgctcttgctggtggtcccaggccatctgattttcttctacatcatctacctggtggagggtcagtcagtcataaacagccagacctttgtggtgctctacctgctggcaggcctgatccaggtgacaatcctgctgtacctggcagaagtgatggttcggctgacttggcaccaggccctggatcctgacaaccactgcatcccctaccttacagggctgggggacctgctcggtactggcctcctggcactctgctttttcactgactggctactgaagagcaaggcagagctgggtggcatctcagaactggcatctggacctccctaactgggccccgctggtcccatttgctcattagaatttcctctcacatcagtgggatacagaattcagtttctcccttgccaggtccttgggatggttgacccctgcctctgcagtagccttttgtgagtctgctaaggtagctctcacacacctcggctctggggttgatacctgagcctgcaatagagccctgaaa

SEQ ID NO: 24 - DNA, 2489 bp, Homo sapiens
  CDS (876)..(2396)
ctactgtgttggcggactggcgggactgggtgctgcgtgagtctctgagcgcagtgcgggcggctggcgcccctcccccggcagcgtgcggcggctggctgtgcggctggcggcggcgtgcggcagctcactcagcccggtcggcgacgccggaacctctgcttgggaaggggacggtgcggtcccactgggggcaatgggtgcgctagcggcggccggcttgttgtcttccggcggctgcctctcccgtgcggaagtcgccagatgggtgatgcgccgggcatttggtggtcgtttgatgtggaatgtggatgagtggtgggtgggtgggggtggttggtacggtcgggcggtggtacggtgttgtcgattcagcttcatcccgtgaggaggtagattgggcatgtgcatgggctccgtgttgaagatcctcaaaaccaacagcacacagcttccagcgcatgctcctttccccaagaccctgtgggggaacccgccgccagcgcggagccaccgtgactcgtagcctgacttccgtttccgggggcggcttccggcggcgtgaccgcaagaggccaatggagtgtgggagctgaaagggtcttcgctggcggccggtaactggcggcggttgggaacggccgagtgtggctcttctggtgtttcagcttggggagagaggggtggccttcttcttgcagttgaggccggcgccgagccggacttcagccggatctcgtggcggagcccatcttgctccctctcccaggcctttacccgctccctaggattcccgggccctgtaggtgggagttgggagacgacagtactgcttttaaagagacagtgttagggatcttggaagcacagccaacatgtgtgacattgaagaagccactaaccaactcctagatgtgaaccttcatgagaaccagaagtctgtacaagtgacagaaagtgacctcggaagtgaatctgagcttctagtcactattggagccactgtacctactggctttgagcaaacagctgcagatgaagtcagagagaaacttgggtcatcatgcaaaatcagcagagaccgtggcaagatatattttgtcatttcagtggaaagtctggcacaggttcattgtctgagatcagttgataacttatttgtggtggttcaggagtttcaagattaccagttcaaacaaacaaaggaagaagttctaaaggattttgaagacttggctggaaaactcccatggtcaaaccccttaaaagtgtggaaaattaatgccagttttaaaaagaaaaaagcaaagcgcaaaaagataaatcagaattcaagtaaagagaagattaataatggacaagaagtcaaaatcgatcagagaaatgttaaaaaagagttcactagccatgctttagattctcatatcttagattattatgaaaatccagccatcaaagaggatgtatcaacattaataggtgatgatttggcatcttgcaaagatgagactgatgaaagctcaaaagaagaaactgagcctcaagtgctgaagtttagagtcacatgcaacagggcaggagagaaacattgctttacctcaaatgaggctgcaagagattttgggggtgctgttcaagattattttaagtggaaggccgacatgaccaactttgatgtggaggttcttttgaacatccatgataatgaagtcattgtgggcattgcattgactgaagagagtctccaccgaagaaatataacacattttggacctacaactcttagatcaactcttgcctatgggatgctcaggctctgtgatcctctaccttatgatataatagtcgatccaatgtgtggaactggggcaataccaatagagggggccactgaatggtctgactgtttccatattgctggtgataataatccactggctgtgaatagagcagcaaataacattgcatctttattgaccaagagccaaattaaagaaggcaaaccctcctggggcttgcccatagatgctgttcagtgggatatctgcaatctgccattgagaactggctctgtggatattattgtaacagatttgccatttggaaaaaggatgggatccaagaagagaaactggaacctttatccagcttgcctacgggagatgagccgtgtctgcacacctaccacaggccgagctgtactacttactcaagacacaaaatgctttaccaaggcgttatctggaatgcgacacgtatggcgaaaggtggatacagtctgggtgaacgttggtggtcttcgtgctgcagtttacgttctgatacgtacacctcaagcttttgttcatccttcagaacaagacggagaaagaggaactctttggcaatgcaaagaatgaagatgactaatagtacttgtacttcccaccactggaaatgttagcataaaagaacttggagaggaaaaaagtattaacaaaaaaaaaaaa

SEQ ID NO: 25 - DNA, 1120 bp, Homo sapiens
  CDS (104)..(901)
gctaggtttgcaaagctgtgggctgagcactcaggcaatcacactctcagaaactgcggcggctctggactgcagcctcccaaggctccatgccagacaaagcatgcgtgtcacacttgctacaatagcctggatggtttcttttgtctccaattattcacacacagcaaatattttgccagatatcgaaaatgaagatttcatcaaagactgcgttcgaatccataacaagttccgatcagaggtgaaaccaacagccagtgatatgctatacatgacttgggacccagcactagcccaaattgcaaaagcatgggccagcaattgccagttttcacataatacacggctgaagccaccccacaagctgcacccaaacttcacttcactgggagagaacatctggactgggtctgtgcccattttttctgtgtcttccgccatcacaaactggtatgacgaaatccaggactatgacttcaagactcggatatgcaaaaaagtctgtggccactacactcaggttgtttgggcagatagttacaaagttggctgcgcagttcaattttgccctaaagtttctggctttgacgctctttccaatggagcacattttatatgcaactacggaccaggagggaattacccaacttggccatataagagaggagccacctgcagtgcctgccccaataatgacaagtgtttggacaatctctgtgttaaccgacagcgagaccaagtcaaacgttactactctgttgtatatccaggctggcccatatatccacgtaacagatacacttctctctttctcattgttaattcagtaattctaatactgtctgttataattaccattttggtacagcacaagtaccctaatttagttcttttggactaatacaattcaggaaagaaaaaacccaaaaaccaacctcattcacatatggctttttttttaaccaataacaattaggtgtacttctattttaaaacatttcagaaaaaaatatatgttatagcaatactcttactcaaaagaagaaatttcctaactctatcagataaactcatctttagtataaataagcattatttgcaggttgccacaggtgga

SEQ ID NO: 26 - DNA, 4431 bp, Homo sapiens
  CDS (25)..(2694)
gcgcggcgccgctcggtgcagaccatgaattacgtggggcagttagccggccaggtgtttgtcaccgtgaaggagctctacaaggggctgaatcccgccacactctcagggtgcattgacatcattgtcatccgccagcccaatggaaacctccaatgctcccctttccacgtccgctttgggaagatgggggtcctgcgctcccgagagaaagtggttgacatagaaatcaatggggaatctgtggatttgcatatgaaattgggagataatggagaagcattttttgttcaagaaacagataatgatcaggaagttatccctatgcacctggccacctcccccatcctgtcagaaggagcttcgagaatggaatgccagctgaaaaggggctctgtggacaggatgagaggcctggaccccagcacgccagcccaagtgatcgctcccagcgagacgccgtcaagcagctctgtagtaaagaagagaagaaaaaggaggagaaagtcacagctggacagcctgaagagagatgacaacatgaacacatctgaggatgaggacatgttccccatcgagatgagctcggatgaggccatggagctgctggagagcagcagaactcttcctaatgatatacctccattccaagatgatattcctgaggaaaacctctccctggctgtgatttaccctcagtcagcctcataccctaattcggatagagagtggtcacccactcccagtccttccggttcccgaccttcaacacctaaaagtgattcagaattggtcagcaagtccacggaaaggacagggcagaagaacccagaaatgctttggctgtggggagagctgccgcaggctgctaagtcttcttctccacacaagatgaaagagtccagcccattgagcagtagaaaaatttgtgataaaagtcactttcaggccattcacagcgaatcttcagacacttttagtgaccaatcgccaactctggtcggtggggcacttttggaccagaacaagcctcagacagaaatgcagtttgtgaatgaagaagacctggagaccttaggagcagcagcgccactcttgcccatgatcgaggagctcaaacccccctctgccagtgtagtccagacagcaaacaagacggattctccttccaggaaaagagataaacgaagccgacatcttggtgctgacggcgtctacttggatgacctcacagacatggatcctgaagtggcggccctgtattttcccaaaaacggagatccttccggactcgcaaaacatgcaagcgacaacggagcccggtcagccaaccagtccccgcagtcggtgggcagctcgggcgtggacagtggcgtggagagcacctcggacgggctgagggacctcccttccatcgccatctccctctgcgggggcctcagcgaccaccgggagatcacgaaagatgcattcctggagcaagctgtgtcatatcaacagtttgtggacaaccccgctattatcgatgaccccaatctcgtggtaaagattgggagtaaatattataactggacaacagcagcacccctcctcctggcaatgcaggccttccagaaacctttgccaaaggccactgtggaatctatcatgagggataaaatgcccaaaaagggaggaagatggtggttttcatggaggggaagaaacaccacaatcaaggaggaaagtaagccagagcagtgcttggctggcaaggcccatagcaccggagagcaaccgccgcagctcagcttggccaccagggtaaagcatgaatcatcctccagtgatgaggagcgcgcagctgccaagccatcaaacgcaggccacctccctcttctgcctaatgtcagctacaagaagactctccggctgacttccgagcagcttaaaagcttgaagttgaagaatggccccaacgacgtggttttcagtgtcaccacgcagtaccaaggcacgtgccgctgtgagggcaccatctatctgtggaactgggatgataaagtcatcatttctgatattgatgggacaattaccagatcagatactcttggccacattttgcccacccttgggaaggattggacccatcagggcatcgctaagctgtaccataaagtgagccagaatggatataaatttctctactgttctgcccgtgccatcgggatggcggacatgacgcggggctacctgcactgggtcaacgagaggggcacggtgctgccccaggggcccctgctgctgagtcccagcagcctcttctctgccctgcacagagaagtgattgaaaagaagccagaaaagtttaaagtccagtgtttgacagacatcaaaaacctgtttttccccaacacagaacccttttatgctgcttttggaaaccgaccagctgatgtgtattcatacaagcaagtaggagtgtctttgaatagaatatttaccgtcaaccctaaaggagagctggtacaggaacatgcaaagaccaacatctcttcgtatgtgagactctgtgaagtagtcgaccacgttttcccgttgctgaaaagaagccattcttcagactttccctgttcggataccttcagtaacttcaccttttggagagagccactgccaccttttgaaaaccaggacattcattctgcctcagcgtaaaatgtcccaagcagcctcttgccagcagtgcagagcctggttgtcacccattaaaggataggtctccccggagtgcacagctccacctgggagcctggcgcgtcatcattggcctgacagcagagagaattgagaagcatttctcccctgccccaccccggggctgacatttctaagcaagataggaagggagcactttctaggctaggagttgggtgcatttgtaccgtgaaaagcattcctcagttgtggcttaatgccagttacgacgctgcctttccggcctgctccagcaagtagctactggttcacgtgcagtttggggctgtgaaacctaggcagaaggcggctgtctgagggctgtccccgcctaggacagggtcaatcgaggaatgccagatgtgcacggtttttggcaaagtagggggcacatttccattatagcaatgttagtgccaccaccttctgaacacagtggggagggctgtgaaggctcatgtgacctggatctgaggtctctgatagaaatctggacgccaccgggtccaggcctggcctcagacttggccttgtggatgggccccttacagtatttgctgactagtctcatttttaggtgataagtttttctttaattcctttggttaaagatagtctatttcattggcatatctccccccagtttttgtggctcaaggctggaatatttatgccttaatatatctatggcagacatttaagaatgcgctttatctagctcatggtaactttgcaacgccttagattaaaatgacagtaaatattactaaggcagtattttgaatgagtttgacactgccggcttccttccatccagcgaggtggtgctgacagtgtggacttgagcacacttatgccaaatgataatgatactgacttctgttgggagctctccaaagaaactggttggttttaagaaaatagtttcaagaagttcaactatattcttttagatattatgtattgttttactctgattaggttactgtgataggcatttattcatattctttctataccactgtcattaatatattaaaaagatgtatgtgttagactatcaaaagggccttattctctctttctcatagactgaccttcttttggaatttctgagtcatttattttccttagctttttccactcaaattaagggcaagcgaaaaagtaataatttggcattctttaagcctacagaatgtgattctttcacttgtttattacactggctcgtggacagaacaatttgaaaagtgaaagaattattttggtaaaagattttgctttacttttcgaagcattatttttttaaagagtgttttactccaacgattgaaacattttcctatttaaatttcatcgttagaatcacaggaggcaaaaaatggaacggttgaatgaaattttactctttctgtgaaagaaaatccacagagttgttgcctccgttgtagttggtgggccccgttagcattggatgcctttgccaaatggttcatgtggacacacaaaggcaaacagatctgccatcgatcgcagatttctgtagaaacacggatgtgcatgtgcagattcccttttgcaggtattaaaaataattaaaaatagtcctgcctgaggttgcagtgagccgagcttgcactactgcactccagcctgggtgacagagtaagactccatgtcaaaaaaaaaaaa

SEQ ID NO: 27 - DNA, 920 bp, Homo sapiens
  CDS (280)..(675)
caacacaggggcagtctccaggacctccacaccattaacaagatgagccttgtgctcccttgggctctagagaggaagcccctctgagccctcagcccctctttcctccctctcctaaagtaatttgatcctcaggaatttgttctgccctcatctggccctggccagctctgcatttgacaaatgccaggaagaggaaactgttgagaaaacggaactactggggaaagggagggctcactgagaaccatcccggtaacccgaccgccgctggtcaccatgaaccacattgtgcaaaccttctctcctgtcaacagcggccagcctcccaactacgagatgctcaaggaggagcaggaagtggctatgctgggggcgccccacaaccctgctcccccgacgtccaccgtgatccacatccgcagcgagacctccgtgcctgaccatgtcgtctggtccctgttcaacaccctcttcatgaacacctgctgcctgggcttcatagcattcgcctactccgtgaagtctagggacaggaagatggttggcgacgtgaccggggcccaggcctatgcctccaccgccaagtgcctgaacatctgggccctgattttgggcatcttcatgaccattctgctcgtcatcatcccagtgttggtcgtccaggcccagcgatagatcaggaggcatcattgaggccaggagctctgcccgtgacctgtatcccacgtactctatcttccattcctcgccctgcccccagaggccaggagctctgcccttgacctgtattccacttactccaccttccattcctcgccctgtccccacagccgagtcctgcatcagccctttatcctcacacgcttttctacaatggcattcaataaagtgtatatgtttctggtaaaaaaaaaaaa

SEQ ID NO: 28 - DNA, 760 bp, Homo sapiens
  CDS (90)..(722)
aaggatccttaattaaattaatcccccccccccccccgctttccgctcggctgttttcctgcgcaggagccgcagggccgtaggcagccatggcgcccagccggaatggcatggtcttgaagccccacttccacaaggactggcagcggcgcgtggccacgtggttcaaccagccggcccgtaagatccgcagacgtaaggcccggcaagccaaggcgcgccgcatcgccccgcgccccgcgtcgggtcccatccggcccatcgtgcgctgccccacggttcggtaccacacgaaggtgcgcgccggccgcggcttcagcctggaggagctcagggtggccggcattcacaagaaggtggcccggaccatcggcatttctgtggatccgaggaggcggaacaagtccacggagtccctgcaggccaacgtgcagcggctgaaggagtaccgctccaaactcatcctcttccccaggaagccctcggcccccaagaagggagacagttctgctgaagaactgaaactggccacccagctgaccggaccggtcatgcccgtccggaacgtctataagaaggagaaagctcgagtcatcactgaggaagagaagaatttcaaagccttcgctagtctccgtatggcccgtgccaacgcccggctcttcggcatacgggcaaaaagagccaaggaagccgcagaacaggatgttgaaaagaaaaaataaagccctcctggggacttggaatcaaaaaaaaaaaa

SEQ ID NO: 29 - DNA, 1486 bp, Homo sapiens
  CDS (629)..(1399)
taagcttgcggccgcggagctgggaaggccgagggcgccgggcacgtctgtgcagatttctttagagtccaggtctgtcgcccgcgtcttcgtcggtggcagcagggctgactggccacggcggccatctgctagagcgcatttcttcccatgaaacgccacctcctccgaagtgcggagcgaacgcagccaaatctacacaaagactgacaagctggatccactcgacggaacccagggccaaaaaacggcggcgagcagcgcctcgggcccgcgattaccggttttctgagcaccggacagcgtgagccgtgccagccctgtctcgccatcccagccgaggagggcagcgcgatggctcttccctgccttgaaatcaaccccattgccagccgctttcgccggcagagcattttccgtggggtccatccggctccaaggcggcctgcgctggccacgtggaaagaaacacgcccactgcctacaggccacgcccttcctcccttcgcgcatgcgccccacccgtcctgaggacctccgaacctgcagggggcgatgaaagtaggcttgcgctccgcttgtagctgcttccgggtcagaggtcagacggtctagcgctgcgtgggccatggtgcagctccgaccgcgagcgtctcgcgccccggcgtcggcggaggcgatggtggacgagggccagctggcctcggaggaggaggaggcggagcacgggctgttgctcgggcagcccagcagcggcgcggccgcagagcccctggaggaagacgacgaaggggacgatgagtttgacgatgaggccccggaggagctgactttcgccagcgcccaggcggaagcgagagaagaggagcggcgagtgcgggagaccgtgcgcagggataaaacgctcctgaaggagaagaggaagcgacgcgaggagctgttcatcgaacagaagaaaagaaaactccttccagacactattttggagaagttaaccacagcttcacagactaacatcaagaaatcgccaggaaaggtgaaagaagttaatttgcaaaagaaaaatgaagactgtgaaaaaggaaatgactccaagaaagttaaagtacaaaaagtacagtctgtcagccagaataaaagctacttggccgtaaggctaaaagaccaagatctgagagattcaaggcaacaagcagcacaagccttcatacataattcattatatgggccaggaaccaacaggactactgtaaataagttcctgtctcttgccaacaagaggttaccagtgaaaagagctgctgtccagtttttgaataatgcttggggaatccaaaaaaaacaaaatgccaagaggtttaaaagacggtggatggtcagaaagatgaaaactaagaagtaaatcaatgctaaatgaagaatctgtactttgtatgtatagaatttatctaataaatcattgttagatcattttaaaaaaaaaaaa

SEQ ID NO: 30 - DNA, 1448 bp, Homo sapiens
  CDS (112)..(762)
cgcgcgggccggcggcggcgcgagtggctcgggagcgcggctgacccccaggctgtggtgagggtctgagagctggtaccacggagcctgggcaacctcctccgcccacccatgcccaccccgcatgaggctgagaagcagatcacagggccagaggaggcggaccggcccccttcaatgtccagtcatgatacagcctctccagcggcccccagccgcaacccctgctgcctgtgctggtgctgctgctgtagctgctcctggaaccaagagcggcggcgcgcgtggcaggcctcccgggagagcaagctgcagcccctccccagctgtgaagtatgtgccacgccaagtcctgaggaggtgcagagctgggcgcagtcttttgacaagctgatgcacagcccagcgggacgcagcgtgttccgggcgttcctgcggacagagtacagcgaggagaacatgctcttctggttggcctgcgaggagctgaaggccgaggccaaccagcatgtggtagacgagaaggcgaggctcatctacgaggactacgtatccatcctgtcccccaaggaggtgagcctggactcccgtgtgcgggagggcatcaacaagaagatgcaggagccgtccgcacacacgttcgacgacgcgcagctgcagatctacacgctcatgcaccgggactcctacccccgcttcctcagctctcccacctaccgtgccctgctgctgcaggggccatcacagtcctcctccgaggcctaggccgccccccagcagcacagaccccgccgcctcctacggccgactctgggttcccttcagggtgttgttgtcggcagggctgtcagggcacatgcctggccggctggggtccccacccgcggagacggtcctagacccagtggggagtgctgtgtctcctgggtctgcccacccgtggccaagcaggaactccaggtgcagggcgggcctccaggtgcagggcgggccagaagccccctcatcggcccgcagctggctggcccagtgctcctggctgggggctcttgcgtggtgagagtaggggtccccccaggagccatgctggacccatgagcctcgctggggcctcctccccaggcagccaatgggccccagacaagcctttggtggggaacagaacctccgcatcgtgtagttttgtgacataaggagacctcctacttgagctgtctgtaccccagaatcaaacacagaacctcagaaccagatttaggacctcagaatcctgcactcaaggtggcaggacccaatttctgttttatatgttcatgaactttaaacctggaaacatgtccttactaggtgttttatcaaaaaaaagttttcatatttatctctatccctaaccccccaaaaataggatgtcttattattgaagatatttttaaagcaaaaaaaaaaaa

SEQ ID NO: 31 - DNA, 3692 bp, Homo sapiens
  CDS (582)..(3689)
agattatgaggaacaggcctcattattttaatacattttttttctaattataaaaactgccatcagagcaagaagatccatgaggacacatttctcttagtttgtttagcttacttgatgtttgctctgcaataacaccagctagcatgaggtaattcactgtaattagagctgccagtgacagttgggcaattcagagagaggcatttgtcaacaggttctactttagacaaggagagggagaaaaacgggcatctcctgcagggatggcttgcctgctcccaaatggagtaggcaaagttcgtcttcatcctcccattaccacattgggagctgctttccttgccttggctttagatcctttctgcgttctgcctcctggttaccccagaatgttccatgtggcctcatatcttcttctacgtttcccagtacaggcccagactttgagtctctctttaaatagaaggcagcataggcttcttctctaggccataaatctacgagtgagatccaaatctgtctcttcttctgttgtttttaacaatcattttcaagctgtgaaaaagggctcctatgacatggtgtcgactctgatcaaacataacactagcctagaccagccctgtgtcaagcgatggtcagcaatgcatgaagcagccaagcaaggccgaaaagatatcgtagctctgctgctgaaacatggaggcaatgtccacctgagagatggatttggagtcacaccactaggcgtcgctgccgagtatggtcactgtgacgtgttagaacatctaatccacaaaggtggtgatgtgcttgctttggcggatgatggggcgtcggtgctgtttgaggcagcaggaggtggcaatcccgactgcatttccctcctgctggaatatggaggaagcggaaatgtacctaaccgagcaggacatcttcctatacaccgagctgcctatgaggggcattatcttgcactgaaatatcttatcccagtaacatctaaaaatgcaattcggaaaagtgggctaacaccaattcactcagcagcagatggacaaaatgcacagtgtctagaactgctcattgaaaatggttttgatgtcaacactctacttgctgaccacatttcccagagctatgacgatgagaggaagactgcgctgtattttggcgtttctaataatgacgttcattgcacagaagtccttctggctgcaggtgcagacccaaacttagatcccctcaactgtctacttgttgcagtgagggccaataattatgaaattgtcaggctgcttctctcccatggagctaatgtcaattgttattttatgcatgtgaatgacactcgtttccccagtgtcattcaatatgctctaaacgacgaggtaatgctgaggctattgctgaataatggctatcaagtggagatgtgctttgactgcatgcatggtgacatctttggaaattcatttgtgtggtcagagatacaggaagaggtgctgccaggatggacatcttgtgtaataaaagataacccggacctggagtcttctaaagtgacagttgtcatgaccctgaggagggaaccataccaaggagatcgctgtcttgggtgctcaccttccacatcattcttcttaatactacagcgaacaactctgtccaaacttgtcagaccaacactcggggtttcaggacagagaaaaggcctttccagcgaagacctatttgaaacagctccttctgggtctgacaaagcagggaccatgtctacctttggctaccgaagaggactcagtaaatacgaatccatcgacgaggatgaactcctcgcctccctgtcagccgaggagctgaaggagctagagagagagttggaagacattgaacctgaccgcaaccttcccgtggggctaaggcaaaagagcctgacagagaaaacccccacagggacattcagcagagaggcactgatggcctattgggaaaaggagtcccaaaaactcttggagaaggagaggctgggggaatgtggaaagctgtctgtagttgccaggcatgatgagcaggaacttgctgatggagggtgcaaatccaattcccacaacagggaaaatcttcgagcagctgttgggtggctgggggagcaaggtagttgcgttgcagaagacaaagaggaaagtgaagaagagcttatctttactgaaagtaacagtgaggtttctgaggaagtgtatacagaggaggaggaggaggagtcccaggaggaagaggaggaagaagacagtgacgaagaggaaagaacaattgaaactgcaaaagggattaatggaactgtaaattatgatagtgtcaattctgacaactctaagccaaagatatttaaaagtcaaatagagaacataaatttgaccaatggcagcaatgggaggaacacagagtccccagctgccattcacccttgtggaaatcctacagtgattgaggacgctttggacaagattaaaagcaatgaccctgacaccacagaagtcaatttgaacaacattgagaacatcacaacacagacccttacccgctttgctgaagccctcaaggacaacactgtggtgaagacgttcagtctggccaacacgcatgccgacgacagtgcagccatggccattgcagagatgctcaaagtcaatgagcacatcaccaacgtaaacgtcgagtccaacttcataacgggaaaggggatcctggccatcatgagagctctccagcacaacacggtgctcacggagctgcgtttccataaccagaggcacatcatgggcagccaggtggaaatggagattgtcaagctgctgaaggagaacacgacgctgctgaggctgggataccattttgaactcccaggaccaagaatgagcatgacgagcattttgacaagaaatatggataaacagaggcaaaaacgtttgcaggagcaaaaacagcaggagggatacgatggaggacccaatcttaggaccaaagtctggcaaagaggaacacctagctcttcaccttatgtatctcccaggcactcaccctggtcatccccaaaactccccaaaaaagtccagactgtgaggagccgtcctctgtctcctgtggccacacctcctcctcctccccctcctcctcctcctccccctccttcttcccaaaggctgccaccacctcctcctcctccccctcctccactcccagagaaaaagctcattaccagaaacattgcagaagtcatcaaacaacaggagagtgcccaacgggcattacaaaatggacaaaaaaagaaaaaagggaaaaaggtcaagaaacagccaaacagtattctaaaggaaataaaaaattctctgaggtcagtgcaagagaagaaaatggaagacagttcccgaccttctaccccacagagatcagctcatgagaatctcatggaagcaattcggggaagcagcataaaacagctaaagcggatgacagaagtgccctgtgatgaccaaatgctcgggcaatgtagggtgactgccgccaatgagccaaaatacaatcacatgcatcagagtcagaggctggctcctcaaaacaagccagcttttctggttagagatggacataggatgttggcggcatctatcaacacccagatgatatga

SEQ ID NO: 32 - DNA, 3572 bp, Homo sapiens
  CDS (582)..(3569)
agattatgaggaacaggcctcattattttaatacattttttttctaattataaaaactgccatcagagcaagaagatccatgaggacacatttctcttagtttgtttagcttacttgatgtttgctctgcaataacaccagctagcatgaggtaattcactgtaattagagctgccagtgacagttgggcaattcagagagaggcatttgtcaacaggttctactttagacaaggagagggagaaaaacgggcatctcctgcagggatggcttgcctgctcccaaatggagtaggcaaagttcgtcttcatcctcccattaccacattgggagctgctttccttgccttggctttagatcctttctgcgttctgcctcctggttaccccagaatgttccatgtggcctcatatcttcttctacgtttcccagtacaggcccagactttgagtctctctttaaatagaaggcagcataggcttcttctctaggccataaatctacgagtgagatccaaatctgtctcttcttctgttgtttttaacaatcattttcaagctgtgaaaaagggctcctatgacatggtgtcgactctgatcaaacataacactagcctagaccagccctgtgtcaagcgatggtcagcaatgcatgaagcagccaagcaaggccgaaaagatatcgtagctctgctgctgaaacatggaggcaatgtccacctgagagatggatttggagtcacaccactaggcgtcgctgccgagtatggtcactgtgacgtgttagaacatctaatccacaaaggtggtgatgtgcttgctttggcggatgatggggcgtcggtgctgtttgaggcagcaggaggtggcaatcccgactgcatttccctcctgctggaatatggaggaagcggaaatgtacctaaccgagcaggacatcttcctatacaccgagctgcctatgaggggcattatcttgcactgaaatatcttatcccagtaacatctaaaaatgcaattcggaaaagtgggctaacaccaattcactcagcagcagatggacaaaatgcacagtgtctagaactgctcattgaaaatggttttgatgtcaacactctacttgctgaccacatttcccagagctatgacgatgagaggaagactgcgctgtattttggcgtttctaataatgacgttcattgcacagaagtccttctggctgcaggtgcagacccaaacttagatcccctcaactgtctacttgttgcagtgagggccaataattatgaaattgtcaggctgcttctctcccatggagctaatgtcaattgttattttatgcatgtgaatgacactcgtttccccagtgtcattcaatatgctctaaacgacgaggtaatgctgaggctattgctgaataatggctatcaagtggagatgtgctttgactgcatgcatggtgacatctttggaaattcatttgtgtggtcagagatacaggaagaggtgctgccaggatggacatcttgtgtaataaaagataacccggacctggagtcttctaaagtgacagttgtcatgaccctgaggagggaaccataccaaggagatcgctgtcttgggtgctcaccttccacatcattcttcttaatactacagcgaacaactctgtccaaacttgtcagaccaacactcggggtttcaggacagagaaaaggcctttccagcgaagacctatttgaaacagctccttctgggtctgacaaagcagggaccatgtctacctttggctaccgaagaggactcagtaaatacgaatccatcgacgaggatgaactcctcgcctccctgtcagccgaggagctgaaggagctagagagagagttggaagacattgaacctgaccgcaaccttcccgtggggctaaggcaaaagagcctgacagagaaaacccccacagggacattcagcagagaggcactgatggcctattgggaaaaggagtcccaaaaactcttggagaaggagaggctgggggaatgtggaaaggttgcagaagacaaagaggaaagtgaagaagagcttatctttactgaaagtaacagtgaggtttctgaggaagtgtatacagaggaggaggaggaggagtcccaggaggaagaggaggaagaagacagtgacgaagaggaaagaacaattgaaactgcaaaagggattaatggaactgtaaattatgatagtgtcaattctgacaactctaagccaaagatatttaaaagtcaaatagagaacataaatttgaccaatggcagcaatgggaggaacacagagtccccagctgccattcacccttgtggaaatcctacagtgattgaggacgctttggacaagattaaaagcaatgaccctgacaccacagaagtcaatttgaacaacattgagaacatcacaacacagacccttacccgctttgctgaagccctcaaggacaacactgtggtgaagacgttcagtctggccaacacgcatgccgacgacagtgcagccatggccattgcagagatgctcaaagtcaatgagcacatcaccaacgtaaacgtcgagtccaacttcataacgggaaaggggatcctggccatcatgagagctctccagcacaacacggtgctcacggagctgcgtttccataaccagaggcacatcatgggcagccaggtggaaatggagattgtcaagctgctgaaggagaacacgacgctgctgaggctgggataccattttgaactcccaggaccaagaatgagcatgacgagcattttgacaagaaatatggataaacagaggcaaaaacgtttgcaggagcaaaaacagcaggagggatacgatggaggacccaatcttaggaccaaagtctggcaaagaggaacacctagctcttcaccttatgtatctcccaggcactcaccctggtcatccccaaaactccccaaaaaagtccagactgtgaggagccgtcctctgtctcctgtggccacacctcctcctcctccccctcctcctcctcctccccctccttcttcccaaaggctgccaccacctcctcctcctccccctcctccactcccagagaaaaagctcattaccagaaacattgcagaagtcatcaaacaacaggagagtgcccaacgggcattacaaaatggacaaaaaaagaaaaaagggaaaaaggtcaagaaacagccaaacagtattctaaaggaaataaaaaattctctgaggtcagtgcaagagaagaaaatggaagacagttcccgaccttctaccccacagagatcagctcatgagaatctcatggaagcaattcggggaagcagcataaaacagctaaagcggatgacagaagtgccctgtgatgaccaaatgctcgggcaatgtagggtgactgccgccaatgagccaaaatacaatcacatgcatcagagtcagaggctggctcctcaaaacaagccagcttttctggttagagatggacataggatgttggcggcatctatcaacacccagatgatatga

SEQ ID NO: 33 - DNA, 2261 bp, Homo sapiens
  CDS (509)..(1582)
attcccgtgtcgacccacgcgtccgcgcgttcccggcagctgcgggctccgaggccagagagaaaagactgcgaggtggccgcagctgtggccggagaggtgggagtcggagcgaggccctctcgggggagcagggtgaacgccggccactctaggatcctcactcggggagaggaggcatagctcgcggtgtcacctccagccgcaacgtactccgggtcggccttgcgctcggggcctgagaggggcggcggcggggtcaggggccgcacaaagaatgaaccagcagtggaagagaaaatactgtaagctggctgactgctggtgaagaaaatgctttatttttgtggcaggcatctgtgggatctgtaatagaaatgggatcttcaatattcatgttattttctcctttggtcttatatgattgttacctttatgaagctttagtgattacaaagcactttttttgtccatttttacctgagctttgtaaactctgatttgcaggatggctggctgtggtgaaattgatcattcaataaacatgcttcctacaaacaggaaagcgaacgagtcctgttctaatactgcaccttctttaaccgtccctgaatgtgccatttgtctgcaaacatgtgttcatccagtcagtctgccctgtaagcacgttttctgctatctatgtgtaaaaggagcttcatggcttggaaagcggtgtgctctttgtcgacaagaaattcccgaggatttccttgacaagccaaccttgttgtcaccagaagaactcaaggcagcaagtagaggaaatggtgaatatgcatggtattatgaaggaagaaatgggtggtggcagtacgatgagcgcactagtagagagctggaagatgctttttccaaaggtaaaaagaacactgaaatgttaattgctggctttctgtatgtcgctgatcttgaaaacatggttcaatataggagaaatgaacatggacgtcgcaggaagattaagcgagatataatagatataccaaagaagggagtagctggacttaggctagactgtgatgctaataccgtaaacctagcaagagagagctctgctgacggagcggacagtgtatcagcacagagtggagcttctgttcagcccctagtgtcttctgtaaggcccctaacatcagtagatggtcagttaacaagccctgcaacaccatcccctgatgcaagcacttctctggaagactcttttgctcatttacaactcagtggagacaacacagctgaaaggagtcataggggagaaggagaagaagatcatgaatcaccatcttcaggcagggtaccagcaccagacacctccattgaagaaactgaatcagatgccagtagtgatagtgaggatgtatctgcagttgttgcacagcactccttgacccaacagagacttttggtttctaatgcaaaccagacagtacccgatcgatcagatcgatcgggaactgatcgatcagtagcagggggtggaacagtgagtgtcagtgtcagatctagaaggcctgatggacagtgcacagtaactgaagtttaaataaaaatgtcttcagctccatgctcaaggttgaaagggttacctgtaaatttctgcccacataacattatactcatccctagtagtgcattttgggagttggggtgggaaggggtatgggaaggatagactcataattaaaatgtctaacatgtctctgttgagaaatttatttaatgtaaggaacttgggtgttaatagttgagagctgtttagtaataacccagttttcttgaggtctgtttactttatactttttaaaaacttctgtagttcttttggccagtgtgtttgtattatctgtgcattaatggtcctcatctgactcctgcattgtgtcttatttttctgcatggattggcataagaccattactaaaatttggcacctgtgagatgtttgatattatgaacaggaaacataatttaatgtatgaatagatgtgaatttgggatttcaaaatagatgaataacaactattttatagtaaagttattgaaatggaaatgaaaacagccagtaacttatgtttcagaatgtttgtaacacacttcatggtgttcccataggctttgctgtctagtcttatagtttgaggtttttttggtctgcatttttctttttgattacaaaatttataatttaataaatactagagtttatcaaaaaaaaaaaa

SEQ ID NO: 34 - DNA, 2356 bp, Homo sapiens
  CDS (85)..(1551)
gcacgaggcggcgccgaagaggcgactgaggccggacggggcggacggcgacgcagcccgcggcagaagtttgaaattggcacaatggaagaagctggaatttgtgggctaggggtgaaagcagatatgttgtgtaactctcaatcaaatgatattcttcaacatcaaggctcaaattgtggtggcacaagtaacaagcattcattggaagaggatgaaggcagtgactttataacagagaacaggaatttggtgagcccagcatactgcacgcaagaatcaagagaggaaatccctgggggagaagctcgaacagatccccctgatggtcagcaagattcagagtgcaacaggaacaaagaaaaaactttaggaaaagaagttttattactgatgcaagccctaaacaccctttcaaccccagaggagaagctggcagctctctgtaagaaatatgctgatcttctggaggagagcaggagtgttcagaagcaaatgaagatcctgcagaagaagcaagcccagattgtgaaagagaaagttcacttgcagagtgaacatagcaaggctatcttggcaagaagcaagctagaatctctttgcagagaacttcagcgtcacaataagacgttaaaggaggaaaatatgcagcaggcacgagaggaagaagaacgacgtaaagaagcaactgcacatttccagattaccttaaatgaaattcaagcccagctggagcagcatgacatccacaacgccaaactccgacaggaaaacattgagctgggggagaagctaaagaagctcatcgaacagtacgcactgagggaagagcacattgataaggtgttcaaacataaggaactgcaacagcagctcgtggatgccaaactgcagcaaacgacacaactgataaaagaagctgatgaaaaacatcagagagagagagagtttttattaaaagaagcgacagaatcgaggcacaaatacgaacaaatgaaacagcaagaagtacaactaaaacagcagctttctctttatatggataagtttgaagaattccagactaccatggcaaaaagcaatgaactgtttacaaccttcagacaggaaatggaaaagatgacaaagaaaattaaaaaactggaaaaagaaacaataatttggcgtaccaaatgggaaaacaataataaagcacttctgcaaatggctgaagagaaaacagtccgtgataaagagtacaaggcccttcaaataaaactggaacggttagagaagctgtgcagggctcttcaaacagaaaggaatgagctcaatgagaaggtggaagtcctgaaagagcaggtatccatcaaagcggccatcaaagcggcgaacagggatttagcaacacctgtgatgcagccctgtactgccctggattctcacaaggagctgaacacttcctcgaaaagagccctgggagcgcacctggaggctgagcccaagagtcagagaagcgctgtgcaaaagcccccgtccacaggctctgctccggccatcgagtcggttgactaagatgaggtgtgatcactgtattgagagatatattttgtgtataactttctctgttagtagttaactattggttttgtggtgaaaattttcttactttttctaccatatctgtattttcttagaactactggacttatgtggtacaggaggctgcttagcagttttgaatagtttaatctataaattttcctcagctgtgttgcacatcagcctcgttctccctccactggaatgcatgtgttcattgccttgtcctttctctccctgctccttgcacattatcatcctaatgaaaatttcactgacagggccgaccattacaagggaactttgttctgacgatggttccttgatgtgaaaacaatattaatttaaacgtcttagcccccccccccataatattattcagaaaaacaaaataccaaggcgattagttttgtctaataacccatttaaatgccaagtaaaaataaaactcctagtgttgggtcagaagcatatttgattgaaattagctttttgaaaacatttatatctcgggacaaattgagatggccacatgcctagaatcctaagtttcggcagaatatgtatataaagatgtcacttgtggacaaaatagtacatagaggcaaatcactagacaaataagcttagtgtttacgtgactgaacagtcatcctgctttggtttcaggtgtgggatttggaccatgaggggctcccgtaaaggatggcggtttgtgtttgattctgatttgggatttcagtacatattctccacttcccatagaaggccactt

SEQ ID NO: 35 - DNA, 2654 bp, Homo sapiens
  CDS (205)..(2511)
atttcgtcgggaggaatggaaggagaaggcggaatgtgggagggctcagggggatgtgggagggacgaacggagaagggggagagaggggggtccagtctcccctggccgagcattttttttttggaagtcctaggactgatctccaggaccagcactcttctcccagcccttagggtcctgctcggccaaggccttccctgccatgcgacctgtcagtgtctggcagtggagcccctgggggctgctgctgtgcctgctgtgcagttcgtgcttggggtctccgtccccttccacgggccctgagaagaaggccgggagccaggggcttcggttccggctggctggcttccccaggaagccctacgagggccgcgtggagatacagcgagctggtgaatggggcaccatctgcgatgatgacttcacgctgcaggctgcccacatcctctgccgggagctgggcttcacagaggccacaggctggacccacagtgccaaatatggccctggaacaggccgcatctggctggacaacttgagctgcagtgggaccgagcagagtgtgactgaatgtgcctcccggggctgggggaacagtgactgtacgcacgatgaggatgctggggtcatctgcaaagaccagcgcctccctggcttctcggactccaatgtcattgaggtagagcatcacctgcaagtggaggaggtgcgaattcgacccgccgttgggtggggcagacgacccctgcccgtgacggaggggctggtggaagtcaggcttcctgacggctggtcgcaagtgtgcgacaaaggctggagcgcccacaacagccacgtggtctgcgggatgctgggcttccccagcgaaaagagggtcaacgcggccttctacagaaagttgaggaagcgagcggccaaggtctcagcccgacaccccaagccccttggaaggctgctagcccaacggcagcaacactcctttggtctgcatggggtggcgtgcgtgggcacggaggcccacctctccctctgttccctggagttctatcgtgccaatgacaccgccaggtgccctggggggggccctgcagtggtgagctgtgtgccaggccctgtctacgcggcatccagtggccagaagaagcaacaacagtcgaagcctcagggggaggcccgtgtccgtctaaagggcggcgcccaccctggagagggccgggtagaagtcctgaaggccagcacatggggcacagtctgtgaccgcaagtgggacctgcatgcagccagcgtggtgtgtcgggagctgggcttcgggagtgctcgagaagctctgagtggcgctcgcatggggcagggcatgggtgctatccacctgagtgaagttcgctgctctggacaggagctctccctctggaagtgcccccacaagaacatcacagctgaggattgttcacatagccaggatgccggggtccggtgcaacctaccttacactggggcagagaccaggatccgactcagtgggggccgcagccaacatgaggggcgagtcgaggtgcaaatagggggacctgggccccttcgctggggcctcatctgtggggatgactgggggaccctggaggccatggtggcctgtaggcaactgggtctgggctacgccaaccacggcctgcaggagacctggtactgggactctgggaatataacagaggtggtgatgagtggagtgcgctgcacagggactgagctgtccctggatcagtgtgcccatcatggcacccacatcacctgcaagaggacagggacccgcttcactgctggagtcatctgttctgagactgcatcagatctgttgctgcactcagcactggtgcaggagaccgcctacatcgaagaccggcccctgcatatgttgtactgtgctgcggaagagaactgcctggccagctcagcccgctcagccaactggccctatggtcaccggcgtctgctccgattctcctcccagatccacaacctgggacgagctgacttcaggcccaaggctgggcgccactcctgggtgtggcacgagtgccatgggcattaccacagcatggacatcttcactcactatgatatcctcaccccaaatggcaccaaggtggctgagggccacaaagctagtttctgtctcgaagacactgagtgtcaggaggatgtctccaagcggtatgagtgtgccaactttggagagcaaggcatcactgtgggttgctgggatctctaccggcatgacattgactgtcagtggattgacatcacggatgtgaagccaggaaactacattctccaggttgtcatcaacccaaactttgaagtagcagagagtgactttaccaacaatgcaatgaaatgtaactgcaaatatgatggacatagaatctgggtgcacaactgccacattggtgatgccttcagtgaagaggcccacaggaggtttgaacgctcccctggccagaccagcacctagattatgtaagtgccactgccctttgcaaaccgcccctggcgcctaatggcaggggtctgaggctgccattacctcaggagcttatcaagaaacccatgtcagcaaccatgtattgcggccgctctagaggaatcgccagc

SEQ ID NO: 36 - DNA, 1452 bp, Homo sapiens
  CDS (115)..(636)
  misc_feature (1)...(1452): n = a,t,c or g
taagcttgcggccgcgccggctccaggaaatggctactgctgacaggaagtttggcatccacctcccccagcctcctgagtggacaggggccctgggcaccacttcagagggccatgaagcccccaggaggagaatcgagcaatctttttggaagtccagaagaagctactccttccagcaggcctaataggatggcatctaatatttttggaccaacagaagaacctcagaacatacccaagaggacaaatcccccagggggtaaaggaagtggtatctttgacgaatcaacccccgtgcagactcgacagcacctgaacccacctggagggaagaccagcgacatttttgggtctccggtcactgccacttcacgcttggcacacccaaacaaacccaaggatcatgttttcttatgtgaaggagaagaaccaaaatcggatcttaaagctgcaaggagcatcccggctggagcagagccaggtgagaaaggcagcgccagaaaagcaggccccgccaaggagcaggagcccatgcccacagtcgacagccatgagccccggctggggccgcgggctcgctctcacaacaaggtcctgaacccaccgggaggcaaatccagcatctccttctactaagagaagccactgctccacccggagccagaccagaaactcaagagatagggtagccatgttttcatttccttttgcccaaatgagcggggtgggaagagggttagtcttatgtgagcctggctgctcagcgtctcctggccgtcatgacagctgcttggagacccgtgccttccagatggctgggagatgcctctgtggggatgaaatggggcacccctggccatcactcatgtgtagtccaggtttgagaggaactggaaggggggtgagggtgggggagtgcncnnnncatnncnctcctctctccctccttccttcttttgcttcccttgtctcgctttctcttcccactctcctgttctctgctctgtggatgggggctgcgtcgctgctcctccgcgtttaattgccttttgttctcctcgtcctttggtgacccggttgcttttcgacttccacttcattaactccacctattgcttgagtagtctattatatactgtagttgtctcggctctcctacacatatcatatatagcattggcgaatctggcttcggtctatcattctaggtgatacatttctatatctatcctctcctggtgctgaatcgtccgacaccatatcaaattcgaacttagtaatgatctgcctatgtactcatacttactcttcacctcgccgtctcctcatacttatctcgctctttatccgattctgtcgtgatcactatcgcacatctcgttactgtccatcttatagattacttcatcctcagactagacttattcgtcaatacacaacatcatcact

SEQ ID NO: 37 - DNA, 495 bp, Homo sapiens
  CDS (74)..(466)
gaaatcatgctgtggcacgcccggaatccgggtcgaccccgcgtccgggcaacgctgcggccccgcccacgtcatggcgcccgaggagaacgcggggaccgaactcttgctgcagagtttggagcgccgcttcctggcggcgcgtgcactgcgctccttaccctggcagagcttagaagcaaagttaagagactcatcagattctgagctgctgcgggatattttgcagaagacgtgctgtatagcccagaagccatcgtgtcgctggtcggggtcctgcggaggctggctgcctaccaggagcaccagcgggctcctcaagtctatgtggcccttaccgtctgcaacccagagacgtgccagctgttcaccactgagctatgccgggctgggatcagatgggaagtggaacctcgtcatgaccagaaactgtttccctacgaagagcacttggagatggcaatgctgaacctcacactgtaggactcacatacc

SEQ ID NO: 38 - DNA, 863 bp, Homo sapiens
  CDS (455)..(631)
atgaacagtgtgtgaattttgagtgattcgtggctttggttgtgagattcaattgtctcccttcagaataggaaccaatgggcagaaaaggaacaatcgtggtgcatgtggtatagtggggtaagaacagctctccagctccctcacttacccatcctgtgttctggggttaattttcatgagctgcaggctcatgtgtaaaaatcttccttcccatggtgtatatgaagtgagttttgtgtctaaattcttagtgagtgctgaataaatatgtattttttctgtattttaacagccaagactatttaagaatagaaagtcctaaatattaaaattcttaactttgagtgcttataacggcctttctccatgttagcctacttaatcctgaatagccttgttttacaaatgtggaaaccacactttagagaagcagcatgctcaaatcacatagatggtaggtgggaaggtaggcttgtttttcaacactgtaagatcttgggcagccataaaaaagaatgagttcatgtcctttgcagggacatggctgaagctggaagctatcattctaagcaaactaatacaggaagagaaaaccaaacaccacatgttctcactcataagtgggagttgaacaatgagaacacatggacacacggaggggaaaatcacatactggggcctctcgatgggtggaggacaaggggaagaagactattaggacaaatacctaatgcatgcggggcttaaaatgtagatgatgggtcaataggcgcatcaaaccaccatgacacatgtacacctatataacaaacctgcatgttctgctcgtgtatcccagaagttaaagtaaaaaaaaaaaa

SEQ ID NO: 39 - DNA, 1437 bp, Homo sapiens
  CDS (140)..(1114)
cctcctcctccttggcatccgcctcttcttcctcctgcgtcctcccccgctgcctccgctgctcccgacgcggagcccggagcccgcgccgagcccctggcctcgcggtgccatgctgccccggcggcggcgctgaaggatggcgacgccgctgcctccgccctccccgcggcacctgcggctgctgcggctgctgctctccggcctcgtcctcggcgccgccctgcgtggagccgccgccggccacccggatgtagccgcctgtcccgggagcctggactgtgccctgaagaggcgggcaaggtgtcctcctggtgcacatgcctgtgggccctgccttcagcccttccaggaggaccagcaagggctctgtgtgcccaggatgcgccggcctccaggcgggggccggccccagcccagactggaagatgagattgacttcctggcccaggagcttgcccggaaggagtctggacactcaactccgcccctacccaaggaccgacagcggctcccggagcctgccaccctgggcttctcggcacgggggcaggggctggagctgggcctcccctccactccaggaacccccacgcccacgccccacacctccctgggctcccctgtgtcatccgacccggtgcacatgtcgcccctggagccccggggagggcaaggcgacggcctcgcccttgtgctgatcctggcgttctgtgtggccggtgcagccgccctctccgtagcctccctctgctggtgcaggctgcagcgtgagatccgcctgactcagaaggccgactacgccactgcgaaggcccctggctcacctgcagctccccggatctcgcctggggaccagcggctggcacagagcgcggagatgtaccactaccagcaccaacggcaacagatgctgtgcctggagcggcataaagagccacccaaggagctggacacggcctcctcggatgaggagaatgaggacggagacttcacggtgtacgagtgcccgggcctggccccgaccggggaaatggaggtgcgcaaccctctgttcgaccacgccgcactgtccgcgcccctgccggcccccagctcaccgcctgcactgccatgacctggaggcagacagacgcccacctgctccccgacctcgaggcccccggggaggggcagggcctggagcttcccactaaaaacatgttttgatgctgtgtgcttttggctgggcctcgggctccaggccctgggaccccttgccagggagacccccgaacctttgtgccaggacacctcctggtcccctgcacctctcctgttcggtttagacccccaaactggagggggcatggagaaccgtagagcgcaggaacgggtgggtaattctagagacaaaagccaattaaagtccatttcagacctgcggaaaaaaaaaaa

SEQ ID NO: 40 - DNA, 4119 bp, Homo sapiens
  CDS (1)..(4116)
atggatgagagtacctttgcaggaggccaggaatatggtggatgggtcccagaacaccacaaaagtaacgaacccaagagtggacacattgaaaaaggtaacacagatcagtgccaagaaagaacccctcaacccatgatttatcccacaggggaaattgagagcacagtgaatgcctggatgctcagccatgagaaagaacaaagtcaaatccttttgatatcgaattgccttgacgctttaaagcaccggagctgtgattatggtctgaaaatagctcttgacataaaacacagattaaagattcagcccaagatatttatctatacaaggacacataaatatgcagtcaccctccacatgcttgctcataccattacctcagaaagagatgacatagaggaatggttaaatgcatgggtagtagaccagtgctgtccaccagaaatgtctgtgatgatggaaatgttctatatttatgctgtccactatgggagatcacttctttcttggagtcaggaggaggagaaggagaagggaggcagggaggaggaggaggaggaggaggaggaggaggaggaggaggaggaggaggaggaggaggaggaggaggaggaggaggaggaggcagaagaagagaaattaggggaggcagctgtcccggagggtgtccagctcggatggctgactgctctttcacttgtcgttaacttccacccagtagtcttagtctccccttggacatggtaccgaccgtgtgccattcttatttcacttgaccgagcccgagctgcagcccagggtggaagccgcaagggctgggcagagttccaggcaagagggaccgagaggcgtgagcagtgctccgcagcgcttgtcagagaaatggagcagcggctcctttgtgggctcttacatccccgtcctgggtgcacagcccggatatttgatctaagcgttgcccgttggctagctgctcggtggggatctgcctgccctgggggcgccgcccgcgctccccgcggtgctctcgctcctgggctgcgccagtccgaggcggtgccggctcctttgcctccccgagtcgcagatgctgcgggcgcctccgggaaaagatctgggcggcgcgctcgctcgtgcccaagtcccatggcgagggcagcccgagtggccgtcgcggctgtaggtccgcatgccgggcaccgcaccaggcgtctagcaggtaggggcagggaaggtagggctgcgctggcggccggtgcccagttaccggcgatcggggacgctcggagacacctggtctcccggaagcgcccttcggaaatgggattcgacccggcttgcgggcggcgggtgtttagaagaagaggctgcgggcaagcagtgccccctctctggttccccggactcctcttagccccctcgtggcctgatgggcggccgggacggagagctcatctcaagtttgcccttctctatggagaaggaaaatttgagtctccagaaggaaagtattttgctaaacgccaagcaagaattagaggatggacacaggaagatccagaagctagtggcacatctagcaacagagccagatcagaacccagtgtgttaaccgtggccgggatcttacagacagagagtcgcaaaactgccaaagacatttgcaagatccgctgtctgtgcgaagaaaaggaaaacgtactgaatatcaactgtgagaacaaaggatttacaacagttagcctgctccagcccccccagtatcgaatctatcagctttttctcaatggaaacctcttgacaagactgtatccaaacgaatttgtcaattactccaacgcggtgactcttcacctaggtaacaacgggttacaggagatccgaacgggggcattcagtggcctgaaaactctcaaaagactgcatctcaacaacaacaagcttgagatattgagggaggacaccttcctaggcctggagagcctggagtatctccaggccgactacaattacatcagtgccatcgaggctggggcattcagcaaacttaacaagctcaaagtgctcatcctgaatgacaaccttctgctttcactgcccagcaatgtgttccgctttgtcctgctgacccacttagacctcagggggaataggctaaaagtaatgccttttgctggcgtccttgaacatattggagggatcatggagattcagctggaggaaaatccatggaattgcacttgtgacttacttcctctcaaggcctggctagacaccataactgtttttgtgggagagattgtctgtgagactccctttaggttgcatgggaaagacgtgacccagctgaccaggcaagacctctgtcccagaaaaagtgccagtgattccagtcagaggggcagccatgctgacacccacgtccaaaggctgtcacctacaatgaatcctgctctcaacccaaccagggctccgaaagccagccggccgcccaaaatgagaaatcgtccaactcctcgagtgactgtgtcaaaggacaggcaaagttttggacccatcatggtgtaccagaccaagtctcctgtgcctctcacctgtcccagcagctgtgtctgcacctctcagagctcagacaatggtctgaatgtaaactgccaagaaaggaagttcactaatatctctgacctgcagcccaaaccgaccagtccaaagaaactctacctaacagggaactatcttcaaactgtctataagaatgacctcttagaatacagttctttggacttactgcacttaggaaacaacaggattgcagtcattcaggaaggtgcctttacaaacctgaccagtttacgcagactttatctgaatggcaattaccttgaagtgctgtacccttctatgtttgatggactgcagagcttgcaatatctctatttagagtataatgtcattaaggaaattaagcctctgacctttgatgctttgattaacctacagctactgtttctgaacaacaaccttcttcggtccttacctgataatatatttggggggacggccctaaccaggctgaatctgagaaacaaccatttttctcacctgcccgtgaaaggggttctggatcagctcccggctttcatccagatagatctgcaggagaacccctgggactgtacctgtgacatcatggggctgaaagactggacagaacatgccaattcccctgtcatcattaatgaggtgacttgcgaatctcctgctaagcatgcaggggagatactaaaatttctggggagggaggctatctgtccagacagcccaaacttgtcagatggaaccgtcttgtcaatgaatcacaatacagacacacctcggtcgcttagtgtgtctcctagttcctatcctgaactacacactgaagttccactgtctgtcttaattctgggattgcttgttgttttcatcttatctgtctgttttggggctggtttattcgtctttgtcttgaaacgccgaaagggagtgccgagcgttcccaggaataccaacaacttagacgtaagctcctttcaattacagtatgggtcttacaacactgagactcacgataaaacagacggccatgtctacaactatatccccccacctgtgggtcagatgtgccaaaaccccatctacatgcagaaggaaggagacccagtagcctattaccgaaacctgcaagagttcagctatagcaacctggaggagaaaaaagaagagccagccacacctgcttacacaataagtgccactgagctgctagaaaagcaggccacaccaagagagcctgagctgctgtatcaaaatattgctgagcgagtcaaggaacttcccagcgcaggcctagtccactataacttttgtaccttacctaaaaggcagtttgccccttcctatgaatctcgacgccaaaaccaagacagaatcaataaaaccgttttatatggaactcccaggaaatgctttgtggggcagtcaaaacccaaccaccctttactgcaagctaagccgcaatcagaaccggactacctcgaagttctggaaaaacaaactgcaatcagtcagctgtga

SEQ ID NO: 41 - DNA, 465 bp, Homo sapiens
  CDS (16)..(408)
cagagagaacccaccatggtgctgtctcctgccgacaagaccaacgtcaaggccgcctggggtaaggtcggcgcgcacgctggcgagtatggtgcggaggccctggagaggatgttcctgtccttccccaccaccaagacctacttcccgcacttcgacctgagccacggctctgcccaggttaagggccacggcaagaaggtggccgacatgcccaacgcgctgtccgccctgagcgacctgcacgcgcacaagcttcgggtggacccggtcaacttcaagctcctaagccactgcctgctggtgaccctggccgcccacctccccgccgagttcacccctgcggtgcacgcctccctggacaagttcctggcttctgtgagcaccgtgctgacctccaaataccgttaagctggagcctcggtggccatgcttcttgccccttgggcctccccccagcccctc

SEQ ID NO: 42 - DNA, 1484 bp, Homo sapiens
  CDS (143)..(1360)
cgggtcgagaggacgaggtgccgctgcctggagaatcctccgctgccgtcggctcccggagcccagccctttcctaacccaacccaacctagcccagtcccagccgccagcgcctgtccctgtcacggaccccagcgttaccatgcatcctgccgtcttcctatccttacccgacctcagatgctcccttctgctcctggtaacttgggtttttactcctgtaacaactgaaataacaagtcttgatacagagaatatagatgaaattttaaacaatgctgatgttgctttagtaaatttttatgctgactggtgtcgtttcagtcagatgttgcatccaatttttgaggaagcttccgatgtcattaaggaagaatttccaaatgaaaatcaagtagtgtttgccagagttgattgtgatcagcactctgacatagcccagagatacaggataagcaaatacccaaccctcaaattgtttcgtaatgggatgatgatgaagagagaatacaggggtcagcgatcagtgaaagcattggcagattacatcaggcaacaaaaaagtgaccccattcaagaaattcgggacttagcagaaatcaccactcttgatcgcagcaaaagaaatatcattggatattttgagcaaaaggactcggacaactatagagtttttgaacgagtagcgaatattttgcatgatgactgtgcctttctttctgcatttggggatgtttcaaaaccggaaagatatagtggcgacaacataatctacaaaccaccagggcattctgctccggatatggtgtacttgggagctatgacaaattttgatgtgacttacaattggattcaagataaatgtgttcctcttgtccgagaaataacatttgaaaatggagaggaattgacagaagaaggactgccttttctcatactctttcacatgaaagaagatacagaaagtttagaaatattccagaatgaagtagctcggcaattaataagtgaaaaaggtacaataaactttttacatgccgattgtgacaaatttagacatcctcttctgcacatacagaaaactccagcagattgtcctgtaatcgctattgacagctttaggcatatgtatgtgtttggagacttcaaagatgtattaattcctggaaaactcaagcaattcgtatttgacttacattctggaaaactgcacagagaattccatcatggacctgacccaactgatacagccccaggagagcaagcccaagatgtagcaagcagtccacctgagagctccttccagaaactagcacccagtgaatataggtatactctattgagggatcgagatgagctttaaaaacttgaaaaacagtttgtaagcctttcaacagcagcatcaacctacgtggtggaaatagtaaacctatattttcataattctatgtgtatttttattttgaataaacagaaagaaattt

SEQ ID NO: 43 - DNA, 1023 bp, Homo sapiens
  CDS (109)..(846)
cggctggtaccccggaagcagtcgctgcaacttccgggaggtgcttgtgtgcctggtgcgggagctacggggcccagggattgtgtttaaagtagtgcttctaccaacatgtcccgtggttccagcgccggttttgaccgccacattaccattttttcacccgagggtcggctctaccaagtagaatatgcttttaaggctattaaccagggtggccttacatcagtagctgtcagagggaaagactgtgcagtaattgtcacacagaagaaagtacctgacaaattattggattccagcacagtgactcacttattcaagataactgaaaacattggttgtgtgatgaccggaatgacagctgacagcagatcccaggtacagagggcacgctatgaggcagctaactggaaatacaagtatggctatgagattcctgtggacatgctgtgtaaaagaattgccgatatttctcaggtctacacacagaatgctgaaatgaggcctcttggttgttgtatgattttaattggtatagatgaagagcaaggccctcaggtatataagtgtgatcctgcaggttactactgtgggtttaaagccactgcagcgggagttaaacaaactgagtcaaccagcttccttgaaaaaaaagtgaagaagaaatttgattggacatttgaacagacagtggaaactgcaattacatgcctgtctactgttctatcaattgatttcaaaccttcagaaatagaagttggagtagtgacagttgaaaatcctaaattcaggattcttacagaagcagagattgatgctcaccttgttgctctagcagagagagactaaacattgtcgttagtttaccagatccgtgatgccacttacctgtgtgtttggtaacaacaaaccaacatcatggaggtccctggattgaaaaaggagcctctcccactcctcctaccaccgaagtggttaggactctatataaataaaaacaaggcttttggaaaaaaaaaaaaa

SEQ ID NO: 44 - DNA, 2173 bp, Homo sapiens
  CDS (311)..(2143)
acttgtgttttggaacagctgcagccggcgctgggcccgcctggaatgcgggaacaggctgcacaccaggacttttatggaaacttgctgctggagacggcggcggcggcggcggcagcggcagccataggactcccagcggctggagcagaagtgttagcggacagagctcccagacccctacccacagccaggcgggacgcgcacagtccctccacgcggaaagaagtaccttcgccggtcaccggctcctgcagggtgcaaatatatacagagcttcataatcagcccaagaccacatagagcaaacatgaatgatatttcccaaaaggctgagattaaagaaatgcttgcttctgatgatgaggaagatgtatcttctaaagtagaaaaggcttatgttccaaaattaacaggaactgtgaagggtagatttgctgaaatggagaaacaaagacaagaggaacaaaggaagagaacggaggaggaacgaaaacgcagaattgagcaggatatgttagaaaagaggaaaatacagcgtgaattagcaaaaagggctgaacagattgaggacaaaaacaatacgggaactgaatcagcatcagaggaaggagatgattcactacttataactgtggtacctgtcaaatcatataaaacatctggaaaaatgaaaaagaattttgaggatctagaaaaagaacgtgaagagaaagaaaggatcaagtacgaggaagataaaagaataagatatgaagaacaacgaccatctctcaaggaagcaaagtgtctttctttagttatggatgatgaaatagaaagtgaagcaaaaaaagaatcactttctcccggaaaattgaaactaacttttgaagaactggagcgacaaagacaagaaaaccgaaagaagcaagctgaagaggaagcaagaaaacgtttagaagaagagaagcgtgcttttgaagaagcaaggcggcaaatggtaaatgaagatgaggaaaaccaagacacagcaaaaatttttaaagggtaccgccctggtaaactcaaactcagttttgaagaaatggaaaggcaaagaagagaagatgaaaaaaggaaagcagaagaagaagccagaaggagaatagaggaagaaaagaaggcgtttgctgaagcaaggagaaatatggtagtagatgatgactccccagagatgtataagacaatctctcaagaatttcttacaccgggaaaactggaaattaattttgaagaattattaaaacaaaaaatggaagaagaaaaacgacgaacagaggaggaacggaagcataagctagaaatggagaaacaagaatttgaacaactgagacaggaaatgggagaggaagaggaagaaaatgaaacctttggattgagcagagaatatgaagaactgatcaaattaaaaaggagtggctctattcaagctaaaaacctaaaaagcaagtttgaaaaaattggacagttgtctgaaaaagaaatacagaaaaaaatagaagaagagcgagcaagaaggagagcaattgaccttgaaattaaagagcgagaagctgaaaattttcatgaggaagatgatgttgatgttaggcctgcaagaaaaagcgaggctccatttactcacaaagtgaatatgaaagctagatttgaacaaatggctaaggcaagagaagaagaagaacaaagaagaattgaagaacaaaagttactacgcatgcagtttgaacaaagggaaattgatgcagcactacaaaagaaaagagaagaggaggaggaggaagaaggtagcatcatgaatggctccactgctgaagatgaagagcaaaccagatcaggagctccatggttcaagaagcctcttaaaaacacatcagttgtagacagtgagccagtcagatttacggttaaagtaacaggagaacccaaaccagaaattacatggtggtttgaaggagaaatactgcaggatggagaagactatcaatatattgaaaggggagaaacttactgcctttacttaccagaaactttcccagaagatggaggagagtatatgtgtaaagcagtcaacaataaaggatctgcagctagtacctgtattcttaccattgaaagtaagaattaatcactctttttatcttttattctatta

SEQ ID NO: 45 - DNA, 929 bp, Homo sapiens
  CDS (626)..(817)
tttgtctgtaatggcaatggcaagacctgaacttcaactttatttttcttaaggtgtcatcacaaagtgtttgaaggaccaaagatagtacttctaaaatttgacagggcttcattttgattttttctccccaaatagttgatagcaataatcaataccagttgagataccaaagaggcagcctttccctgattgccacaccacttgtaggcctttgctagaatggtcattaatacgtatgaatcagttgagctaaatattatttagaacgtggcaaaatgctggctgtaaattaaatcaaagataagtaattcaaaggctttaactgaaaatttctgaaaagatgtttgctgtgctattaaagatgttaaataacaaaaattaaaagaactgagaaagactataccatgaaagtgcataatagtgaagaaaaaaatgaagttcccttggcgttagccaggtgcatgcaaatctttttatctgaatgtagaaatgcaaaaagtaccaggagaacatttctgaaagtagtcaagtatgttttaacatttatctccttataatatgcaaactgccaaactggagttatgtttttagttggtaattgatatatatatatatttttgagatggagtttcactcgtcgcccaggctggagtgcagtggcacgatctcggctcactgcgacctccacctcctgggttcaagtgattctcctgcctccacctcccgagtagttgggaccacaggcgtgtgccaccatgcctggacagttttggggtttttttgtatttttagtggagacagggttttgccatcttgaccaggctaatctcgaacccctgacctcaggtgatccgccagccttggcctcccaaagtgctgggattatttgaggtcaggagttagtgatcagcctggtcaacatggtg

SEQ ID NO: 46 - DNA, 2526 bp, Homo sapiens
  CDS (1549)..(2469)
atgagggaatacattgcctccaagcaccgacgggggctttccagctcggccctgccgcgcctcaccgaggccgaaaggaggctgctcaagggcacggtcgacttctgcgcgctcaaccacttcaccactaggttcgtgatgcacgagcagctggccggcagccgctacgactcggacagggacatccagtttctgcaggacatcacccgcctgagctcccccacgcgcctggctgtgattccctggggggtgcgcaagctgctgcggtgggtccggaggaactacggcgacatggacatttacatcaccgccagtggcatcgacgaccaggctctggaggatgaccggctccggaagtactacctagggaagtaccttcaggaggtgctgaaagcatacctgattgataaagtcagaatcaaaggctattatgcattcaaactggctgaagagaaatctaaacccagatttggattcttcacatctgattttaaagctaaatcctcaatacaattttacaacaaagctcactcgaaagtttggcataactacaacacacatttccgcccacatcagaagggttggttatcgatcacgttgggatctcattggatcgagccaaaccggtcggaaaacacgatggatatattcaaatgtcaacaatccatggtttctgtgcttggatggtttgccaaccctatccatggggatggcgactatccagaggggatgagaaagaagttgttctccgttctacccattttctctgaagcagagaagcatgagatgagaggcacagctgatttctttgccttttcttttggacccaacaacttcaagcccctaaacaccatggctaaaatgggacaaaatgtttcacttaatttaagagaagcgctgaactggattaaactggaatacaacaaccctcgaatcttgattgctgagaatggctggttcacagacagtcgtgtgaaaacagaagacaccacggccatctacatgatgaagaatttcctcagccaggtgcttcaagcaataaggttagatgaaatacgagtgtttggttatactgcctggtctctcctggatggctttgaatggcaggatgcttacaccatccgccgaggattattttatgtggattttaacagtaaacagaaagagcggaaacctaagtcttcagcacactactacaaacagatcatacgagaaaatggtttttctttaaaagagtccacgccagatgtgcagggccagtttccctgtgacttctcctggggtgtcactgaatctgttcttaaggttacattgtttctgtgtttgaacgtggcagtcaagaacataagaaatcatggtattcggcttttacatctgaacacaaacgtgtatgagatagccaaaacactacaaaatccacgagtctgcacatgtatctcaaaagaaccttcgacaactcaaagagtgcctgttagggtgttgcacgattgctactgcacttctcaatgtctgccgctgaagcctagcggacagctcggcaagcgccatatgagcctggcggcgccagatgcgaatcctgttgtgggctttttggcctattcccgcccctcagtcttgccgggatggcaccgcccgcataggacttccagggttgggctgagtgggagttcgactgctgggcctcgtaattctcgctttggggctgctccttccaggctgggacacactggggcccgctgtcggtctcccgtcctccgacatcttgtctggaacttccgcctggcagtctccagtaggagtggagctctaatgaagactattctcagcaatcagactgtcgacattccagaaaatggtatgagacttgatgtcttttacttacatctttactgcacgttccaagcgttgtgtggcctgacgagtgtgttctctcttctagtcgacattactctgaagggacgcacagttatcgtgaagggccccagaggaaccctgcggagggacttcaatcacatcaatgtagaactcagccttcttggaaagaaaaaaaagaggctccgggttgacaaatggtggggtaacagaaaggaactggctaccgttcggactatttgtagtcatgtacagaacatgatcaagggtgttacactgggcttccgttacaagatgaggtctgtgtatgctcacttccccatcaacgttgttatccaggagaatgggtctcttgttgaaatccgaaatttcttgggtgaaaaatatatccgcagggttcggatgagaccaggtgttgcttgttcagtatctcaagcccagaaagatgaattaatccttgaaggaaatgacattgagcttgtttcaaattcagcggctttgattcagcaagccacaacagttaaaaacaaggatatcaggaaatttttggatggtatctatgtctctgaaaaaggaactgttcagcaggctgatgaataagatctaagagttacctggctacagaaagaagatgccagatgacacttaagacct

SEQ ID NO: 47 - DNA, 1326 bp, Homo sapiens
  CDS (359)..(1015)
cagagagaccctgtgccagtggagcacactctcctatcctggcctggtgaaggagctgtgtgccctcttcattggctctgagctccttccaaaagatgaattaaatgatctgatcgaccgagccttcagcagattccgtcacagagaagtggtccatctgtccaggttgaggaatgggctgaacgtgttggagctgtggcatggcgtcacatatgcatttaaggacctgtccctgtcctgcacaacacagttcctgcagtacttcctggagaagagggagaagcacgtcactgtggttgtaggaacatctggggacacaggaagtgctgccattgagagtgttcaaggggcaaagaacatggacattatcgttctgctgcccaaaggtcactgcacaaagattcaggagctccagatgacaacggtgctgaagcagaacgtacatgtgtttggagtggagggaaacagcgatgagctcgatgagccgatcaagactgtgtttgccgatgtggcttttgtcaagaagcacaatctgatgagcctgaattcgatcaactggtcccgggtcctggtgcagatggcccatcacttctttgcttacttccagtgtacgccatccttggacacacatcccctacccctggtggaggtggttgtgccaacaggggctgccggtaaccttgcagctgggtacattgctcaaaagataggcctgcccatccgtctggtcgtggcagtgaaccgcaatgacatcatccacaggactgtccagcagggagacttctctctctctgaggctgttaaatcaaccttggcatcagctatggacattcaggtgccctacaacatggagagggtgttctggctgctctctggctctgacagccaggtgacaagagccctcatggagcagtttgaaaggacccaaagtgtgaatctgcccaaggaactgcacagcaaggggccctcttcttctccaagcagtgggagagacaggactacgaaaaaatggctgtaatggagtgtgatgggtgctgtgtggaactgtgccttggaaactgtgggcccagaagagggagcgtgacagatatcccagggacagccatggtcagaggtggtggctgagctggcctccaaccaggaggagcagtttgccaggtagcgtcattgtagcaataagttcaaggtgccaattgtctgtctgtgtctctgtcctccatacccccccatccctaaacttcctctgtttcttattcctcctccaccttctcctttcccatctctctattctctcattggcctccggctgccacctgcccccatccc

SEQ ID NO: 48 - DNA, 1422 bp, Homo sapiens
  CDS (1)..(1419)
atgagggcagtgtcattgcttgtgttggttcttggggtcacaatgtcctatgtaatgccttggcctcaaactgagaattacaccatctacttccctggttctgaggccttcaaacttggacgagccataagctcacttcccagcatccagtatccagggtcttcagcttacagatggcctgttatggagcttctcagcctctataattacgcaaggagggccttgatgggcaacttagcaaatgtcattccctgggggtggtctgagaagatgaccattgagtatttaaatccggggacaggagaacttttaaacaacagccgaggcgatgcgcctcattcagaacatgtgcaccatcgccgagtaccccgcgccggcaacgccgcggcctccgactgctgtgtgggcgccgcggcgccgcctggtcaagatcgccgtggtggggccagcggcgtgggcaagaccgggagccgctgccccttgggagtgggcttagccgttgtctacgccacccgcctgcttccacagacgggggaaacaaggatcaagaatggccaggcagctttctggggacaccggcaccgccgccatcagaactttggggtgtttgagcctctgcaatgcctggcacagaaaggggagttagtgaagctagcccccctgggaggtcttgaagcactggtggtccggttcctcaccaaacgattcatcggtgactatgaaagaaatgcaggtaatctctatactagacaagttcagatagaaggtgaaaccctggctcttcaggttcaagacactccaggtattcaggtccatgagaacagcctgagctgcagtgaacagctgaataggtgcattcgctgggcagatgctgtggtgatcgttttctccatcactgactacaagagctatgaactcatcagccagctccaccagcacgtgcagcagctacacctgggcacccggctgcctgtggtggtcgtggccaacaaagctgacctgttgcacatcaaacaggttgaccctcagcttggactgcagctagccagcatgctaggctgctcattctatgaagtgtctgtcagtgaaaattataatgatgtctacagcgccttccacgtcctctgtaaagaggtcagtcacaaacagcagcctagcagtacacccgagaagcgaagaacctccctcattcccaggcccaagtcacccaacatgcaggacctgaagaggaggtttaagcaagccctctctgccaaagcatcttataagccattgttgaagcaagttgtggaggaaatatttcatcccgagaggccagattccgttgatattgaacacatgtcttcaggcctcactgatctccttaaaactggatttagcatgttcatgaagtccaacatcacagtgcctttaatacactaa

SEQ ID NO: 49 - DNA, 680 bp, Homo sapiens
  CDS (240)..(623)
taagcttgcggccgcgtgagccgccggagcaggagctgcagcgacgtcgggagcagaagcggcggcgacacgacgcgcagcagctgcagcagctcaagcacctggagtccttttacgaaaaacctcctcctgggcttatcaaggaagatgagactaagccagaagattgcataccagatgtaccaggcaatgaacacgccagggaatttctggctcatgcaccaactaaaggactttggatgccactggggaaagaagtcaaagttatgcagtgttggcgttgcaaacgctatggtcaccgaacgggtgacaaagaatgccctttctttatcaaaggcaaccaaaagttagagcagttcagagtggcacatgaagatcccatgtatgacatcatacgagacaataaacgacatgaaaaggacgtaaggatacagcagttaaaacagttactggaggattctacctcagatgaagataggagcagctccagttcctctgaaggtaaagagaaacacaagaaaaagaagaagaaagaaaagcataagaaaaggaagaaagaaaagaaaaagaagaaaaaacggaagcacaaatcttccaagtcaaatgagggttctgactcagagtgacaaggatgtgacttgttcaacattctcttctcaaacactgaccaaggaacagag

SEQ ID NO: 50 - DNA, 3087 bp, Homo sapiens
  CDS (1880)..(2281)
atggggtgtacaccttcacacagtgaccttgtaaacagcgttgcaaagagtggcattcagttcttgaaaaagcccaaagcaattcggccaggatgtcagggcggaagtgaaagaggttccatccctttgctggttaaaaactccacctgctatgacgctggggagggcctggcagaggagcagccaagtcccaggaggaaccaaaccacagctaaaggtctttgtcagctcatgggagatcctgcttcaggcaaaaggaaagatatggaaggactgatcccaggaaccaaaacctcttcatcccagctgaacaaatcacaaagccacatggctaaggatattccgttcaagacacagggttcccatggatcacaaggggcagacttttctggagatgagagtgaggaaagtagtacccaagatacttccaaatggaaaaggacagcaaaatgtcacacgtcaagcacacagagccactgctaccaaaccatccaccctgctcatgagcctgaaggcaaagtggacttcccggagcctctggtaaaggcccaccagcaggcttacacctatctacactccagcctctccaaatatgaagcaattctgtgcatcatccatcaggccacccagacccgggagctgctgcagcccatggtcagcttcttgctgctgtgctttgaggagatcagccagctgttgggggagatctccaaggatggagaagtgctcctgcaggaagtcagggaggatctggcttggcctttgaagaaaagagagccccaggagcagccaaatctcctgcaacagctgctacagtacacagtcagcaagctgcaggtgctcaatggcacagtggcctcgctcaccggcagcttcctggagggctccagcagctacctccactccactgcaacccacttggaaaataagctgagcacaaaaaggaatgtggatgaacgcctcctgagggctctgaggcagctagagagcctggcgagtggctgtggcgaccctggggtgcagggtctccccttatgctctgaggacagtggcattggtgctgacaatgagtccgtgcagtcggtggacaagctgggcaagcaaaccagctgggaccttgcaccagagcccgaagaatggaagtcggtgacttcaccccacacagaggccaggcagtcaggacacacctggcagcaaagtccattctgtttgggctcaggcagaccccaggactgcctgctctcaggggctcctatggcaaaggttcagccacgagcacaggacgaagcaaggagcccatgcctctccagtacaagcccagaaaatatcacctccccacctttgaagctggggacaagcaccccatgtgattcctttgggattggggtctctgtggaaccacacctttccaaaacctccaggccgatggacgcttcatctcttagtgacagcgaggacagcagcccagaggaggaggaggaagacaaaatgagcagcatgagtctgtgtgcctggcaggaaaaaactccacattcaaggccacaatcttcacctgctgaccgggaaagcccatttcaggcccgcaccaggaggcttaggagcctccaggcccaggaaatgattctgaagatgaaggagtcaatcagcgaaaggatcaagtttgtccctgtgccctgtgggcaccaggactggtctgaggaggaggaggggaggacagtggtccccccaagacctagcacggtaagtggcagcaggagggcccctgagaggcagacgaggtcccagtcagagtcgtgtctccagagtcacgtggaggaccccacctttcaggagctgcgaagggtccagagggacctcagtcagaagctggaggcattttatgccctgggtgccaaagggcaggggcagagccaggagcaaattctgcagcccagagcagccgccgtgtggcccaatggcacctgcagggtcagtccaagcaacaccaccagcaggctcaaggcatccctcaccaagaacttcagtattttgcctagtcaggacaagagcatcttgcagaaatgcaatccccatcctgaggacgaacaaggcaaagctgggaagcttccaaatgccatcccatcaggaagagcagaagcagccaagagtgaggagctcagctgtgaaatggaggggaacctcgaagcacctccctccaccgcctatggaagttctgatggacaaatcattcgcttctctggagtccccagaaagcagcaagtccacagagaactccaccaagtgaacccaggagccagggccgggagaggctggccccaccaggagaacatgggattccccaaagctgagggcctctgtgagccccctggacttgctgcccagcaagagcgccgccagcctgaccaagcctcacagcacagggccagggagtggcaggagcagctgccagcccaggaagccagccctggacctgagcagcccaccagccaccagccaaagccccgaggaggacagcttctgaccgccagccaggtggccgaccgcagcctcccaccttggaccccaccagcacctcttatgaatcccagctcggccagaacagtgctggtggcctcagtttacccccggaagccgcaagctgttgagcggcatgtccttcccatcctctggcacttcctgaacaccgccaccaggaatggcaccctgcctggacccagcgggaacatccgcggggtggtgtgccggctgtccaggagcctccaggagcacatgggctcccgcctgctggactttgccgccagccagccaaagcacgtcctcaagacgctccaggaactcttagactcagagtccttgggaggcagccgcaaggccactgacagaggggtggcccctgacagcaagacaactggcagctcatacccttttcagctggattaaagatggatctgaaatgggcaattattatttatcttatttttttgatggactattctcctggttactttcccccttagagttccagatgtacatggtatattttgaagtagaaataaaagaattacttatttttctaaaaaaaaaaaa

SEQ ID NO: 51 - DNA, 1832 bp, Homo sapiens
  CDS (1)..(1779)
atggagggcgcagggccccggggggccgggccggcgcggcgccggggagccggggggccgccgtcaccgctgctgccgtcgctgctgctgctgctgctgctctggatgctgccggacaccgtggcgcctcaggaactgaaccctcgcggccgcaacgtgtgccgtgctcccggctcccaggtgcccacgtgctgcgctggctggaggcagcaaggggacgagtgtgggattgcggtgtgcgaaggcaactccacgtgctcagagaacgaggtgtgcgtgaggcctggcgagtgccgctgccgccacggctacttcggtgccaactgcgacaccagtgagcgtggggtcgggccggtattggtcggtggggcggaatcctggagagatggggcggggtccaaggtggggcggggtcggatccgccttcggggcgggtccccagaggtggcggctggagtgcgggacgcgggcaggttccggctggctgggggcacctactcaagcaccggggccttccaccccctccgctcctcccctgcagagtgcccgcgccagttctggggccccgactgcaaggagctgtgtagctgccacccacacgggcagtgcgaggacgtgacaggccagtgtacttgtcacgcgcggcgctggggcgcgcgctgcgagcatgcgtgccagtgccagcacggcacgtgccacccgcggagcggcgcgtgccgctgtgagcccggctggtggggcgcgcagtgcgccagcgcgtgctactgcagcgccacgtcgcgctgcgacccacagaccggcgcctgcctgtgccacgcaggctggtggggccgcagctgcaacaaccagtgcgcctgcaactcgtctccctgcgagcagcagagcggccgctgtcagtgccgcgagcgtacgttcggcgcgcgctgcgatcgctactgccagtgcttccgcggccgctgccaccctgtggacggcacgtgtgcctgcgagccgggctaccgcggcaagtactgtcgcgagccgtgccccgccggcttctacggcttgggctgtcgccgccggtgtggccagtgcaagggccagcagccgtgcacggtggccgagggccgctgcttgacgtgcgagcccggctggaacggaaccaagtgcgaccagccttgcgccaccggtttctatggcgagggctgcagccaccgctgtccgccatgccgcgacgggcatgcctgtaaccatgtcaccggcaagtgtacgcgctgcaacgcgggctggatcggcgaccggtgcgagaccaagtgtagcaatggcacttacggcgaggactgcgccttcgtgtgcgccgactgcggcagcggacactgcgacttccagtcggggcgctgcctgtgcagccctggcgtccacgggccccactgtaacgtgacgtgcccgcccggactccacggcgcggactgtgctcaggcctgcagctgccacgaggacacgtgcgacccggtcactggtgcctgccacctagaaaccaaccagcgcaagggcgtgatgggcgcgggcgcgctgctcgtcctgctcgtctgcctgctgctctcgctgctcggctgctgctgcgcttgccgcggcaaggaccctacgcgccgaccccgccccgcagggagtttcgcttgggaggaagaaggcgccgcaccgactatgcgggcgcttcagtcgcatcagcatgaagctgccccggatcccgctccggaggcagaaactacccaaagtcgtagtggcccaccacgacctggataacacactcaactgcagcttcctggagccaccctcagggctggagcagccct

SEQ ID NO: 52 - DNA, 2869 bp, Homo sapiens
  CDS (253)..(2826)
cacgtgacctgtttataaaaatatatattaaaaaagttgtaaaaacatgtgtctgagttgtttttaggtccccagacagcggtgtaggtgggcatatctgccctgcgcatcccaggtctcgggattctcctgtacctcttatcagatttattctttcttgcaacaaaggggtagaggctggatgccgacatggtagaatggaaacagcagtgactacatggaaggcagaggacctcccattcctgtgcagccatggagaagatgtcccgtgtgaccacagccctgggtggcagcgtgctgacaggccgcaccatgcactgccacctggatgctcccgccaatgccatcagtgtgtgccgcgacgcagcccaggtggtcgtggcaggccgtagcatcttcaagatctatgccatcgaggaggaacagttcgtggaaaagctgaacctgcgtgtggggcgcaagccttcgcttaacctgagctgtgctgacgtggtctggcaccagatggatgagaacctgctggccacagcagccaccaatggcgtggtggtcacgtggaacctgggccggccatcccgcaacaagcaggaccagctgttcacagaacacaagcgcacggtaaacaaagtctgcttccaccccaccgaagcccacgtgctgctcagtggctcccaggatggcttcatgaagtgctttgacctccgcagaaaggactctgtcagcaccttctcgggtgaggccacagaggcagggccacgggagtgggcgatggctgggtgcgttcctattctcccagtgctcagctgccgcatcctgaggctgcaccacagctttgctcatggaccgatgcaggatgcagaatctacggcaaatgacgcccgggaatcttggggatgtccactctaccctctgggcctctgttctgggccacaggcaggccagtcggagagcgtgcgggacgtgcagttcagtatccgggactacttcaccttcgcctccacctttgagaacggcaatgtgcagctctgggacatccggcgtcccgaccggtgcgagaggatgttcacagcccacaacggacccgtcttctgctgcgactggcaccccgaggacaggggctggttggccactggagggcgcgacaagatggtgaaggtctgggacatgaccacgcaccgtgccaaggagatgcactgtgtgcagaccatcgcctcggtggcccgtgtgaagtggcggccagagtgccgccaccacctggccacgtgctccatgatgggggaccacaacatctatgtttgggacgtgcgccggcccttcgtgccagctgccatgtttgaggaacaccgagacgtcaccacgggaattgcctggcgccacccccacgacccctccttcctgctgtctggctccaaggacagctcgctgtgccagcacctgttccgcgacgccagccagcccgtcgagcgcgccaaccctgagggcctctgctacggcctcttcggggacctggccttcgccgccaaggagagcctcgtggctgccgagtcggggcgcaagccctacactggcgaccggcgccaccccatcttctttaagcgcaagctggaccctgccgagcccttcgcaggcctcgcctccagtgccctcagtgtctttgagacggagccaggtggcggcggcatgcgctggtttgtggacacagctgagcgttatgcgctggctggccggccactggccgagctctgtgaccacaacgcaaaggtggctcgagagcttggccgcaaccaggtggcgcaaacgtggaccatgctgcggatcatctactgcagccctggcctagtgcccactgcaaacctcaaccacagtgtgggcaagggtggctcctgtggcctcccgctcatgaacagtttcaacctgaaggatatggccccagggttgggcagtgagacgcggctggaccgcagcaaaggagatgcacggagcgacacagttctgctcgactcctcggccacactcatcaccaatgaggataacgaggaaaccgagggcagcgacgtacctgccgactacctgctgggtgacgtggaaggtgaggaggacgagctgtacctgctggatccggaacacgcgcaccccgaggaccctgagtgcgtgctgccgcaggaggcctttccgctgcgccacgagatcgtggacacgcctcccgggcccgagcacctgcaggacaaggccgactccccgcacgtgagcggcagcgaggcggatgtggcctccctggcccccgtggactcctccttctcgctcctgtctgtctcacacgcgctctacgacagccgcctgccgcccgacttcttcggcgtgctggtgcgcgacatgctgcacttctacgctgagcagggcgacgtgcagatggctgtgtctgtgctcatcgtcctgggtgaacgggtgcgcaaggacatcgacgagcagacccaggagcactggtacacttcctacatcgacctgctgcagcgcttccgcctctggaacgtgtccaacgaggtggtcaagctgagcaccagccgcgccgtcagctgcctcaaccaggcctccaccaccctgcacgtcaactgcagccactgcaagcggcccatgagcagccggggctgggtctgcgacaggtgccaccgctgcgccagcatgtgtgccgtctgccaccacgtagtcaagggtctcttcgtgtggtgccagggctgcagccacggcggccacctgcagcacatcatgaagtggctggaaggcagctcccactgtcccgcaggctgcggccacctctgcgagtactcctgacggggcatctgctgggcttgcccgggcggccgcaagctta

SEQ ID NO: 53 - DNA, 2665 bp, Homo sapiens
  CDS (253)..(2622)
cacgtgacctgtttataaaaatatatattaaaaaagttgtaaaaacatgtgtctgagttgtttttaggtccccagacagcggtgtaggtgggcatatctgccctgcgcatcccaggtctcgggattctcctgtacctcttatcagatttattctttcttgcaacaaaggggtagaggctggatgccgacatggtagaatggaaacagcagtgactacatggaaggcagaggacctcccattcctgtgcagccatggagaagatgtcccgtgtgaccacagccctgggtggcagcgtgctgacaggccgcaccatgcactgccacctggatgctcccgccaatgccatcagtgtgtgccgcgacgcagcccaggtggtcgtggcaggccgtagcatcttcaagatctatgccatcgaggaggaacagttcgtggaaaagctgaacctgcgtgtggggcgcaagccttcgcttaacctgagctgtgctgacgtggtctggcaccagatggatgagaacctgctggccacagcagccaccaatggcgtggtggtcacgtggaacctgggccggccatcccgcaacaagcaggaccagctgttcacagaacacaagcgcacggtaaacaaagtctgcttccaccccaccgaagcccacgtgctgctcagtggctcccaggatggcttcatgaagtgctttgacctccgcagaaaggactctgtcagcaccttctcgggccagtcggagagcgtgcgggacgtgcagttcagtatccgggactacttcaccttcgcctccacctttgagaacggcaatgtgcagctctgggacatccggcgtcccgaccggtgcgagaggatgttcacagcccacaacggacccgtcttctgctgcgactggcaccccgaggacaggggctggttggccactggagggcgcgacaagatggtgaaggtctgggacatgaccacgcaccgtgccaaggagatgcactgtgtgcagaccatcgcctcggtggcccgtgtgaagtggcggccagagtgccgccaccacctggccacgtgctccatgatgggggaccacaacatctatgtttgggacgtgcgccggcccttcgtgccagctgccatgtttgaggaacaccgagacgtcaccacgggaattgcctggcgccacccccacgacccctccttcctgctgtctggctccaaggacagctcgctgtgccagcacctgttccgcgacgccagccagcccgtcgagcgcgccaaccctgagggcctctgctacggcctcttcggggacctggccttcgccgccaaggagagcctcgtggctgccgagtcggggcgcaagccctacactggcgaccggcgccaccccatcttctttaagcgcaagctggaccctgccgagcccttcgcaggcctcgcctccagtgccctcagtgtctttgagacggagccaggtggcggcggcatgcgctggtttgtggacacagctgagcgttatgcgctggctggccggccactggccgagctctgtgaccacaacgcaaaggtggctcgagagcttggccgcaaccaggtggcgcaaacgtggaccatgctgcggatcatctactgcagccctggcctagtgcccactgcaaacctcaaccacagtgtgggcaagggtggctcctgtggcctcccgctcatgaacagtttcaacctgaaggatatggccccagggttgggcagtgagacgcggctggaccgcagcaaaggagatgcacggagcgacacagttctgctcgactcctcggccacactcatcaccaatgaggataacgaggaaaccgagggcagcgacgtacctgccgactacctgctgggtgacgtggaaggtgaggaggacgagctgtacctgctggatccggaacacgcgcaccccgaggaccctgagtgcgtgctgccgcaggaggcctttccgctgcgccacgagatcgtggacacgcctcccgggcccgagcacctgcaggacaaggccgactccccgcacgtgagcggcagcgaggcggatgtggcctccctggcccccgtggactcctccttctcgctcctgtctgtctcacacgcgctctacgacagccgcctgccgcccgacttcttcggcgtgctggtgcgcgacatgctgcacttctacgctgagcagggcgacgtgcagatggctgtgtctgtgctcatcgtcctgggtgaacgggtgcgcaaggacatcgacgagcagacccaggagcactggtacacttcctacatcgacctgctgcagcgcttccgcctctggaacgtgtccaacgaggtggtcaagctgagcaccagccgcgccgtcagctgcctcaaccaggcctccaccaccctgcacgtcaactgcagccactgcaagcggcccatgagcagccggggctgggtctgcgacaggtgccaccgctgcgccagcatgtgtgccgtctgccaccacgtagtcaagggtctcttcgtgtggtgccagggctgcagccacggcggccacctgcagcacatcatgaagtggctggaaggcagctcccactgtcccgcaggctgcggccacctctgcgagtactcctgacggggcatctgctgggcttgcccgggcggccgcaagctta

SEQ ID NO: 54 - DNA, 6324 bp, Homo sapiens
  CDS (1)..(3570)
atggaggtggacaccgaggagaagcggcatcgcacgcggtccaaaggggttcgagttcccgtggaaccagccatacaagagctgttcagctgtcccacccctggctgtgacggcagtggtcatgtcagtggcaaatatgcaagacacagaagtgtatatggttgtcccttggcgaaaaaaagaaaaacacaagataaacagccccaggaacctgctcctaaacgaaagccatttgccgtgaaagcagacagctcctcagtggatgagtgtgacgacagtgatgggactgaggacatggatgagaaggaggaggatgagggggaggagtactccgaggacaatgacgagccaggggatgaggacgaggaggacgaggagggggaccgggaggaggaggaggagatcgaggaggaggatgaggacgatgacgaggatggagaagatgtggaggatgaagaagaggaagaggaggaggaggaggaggaggaagaggaagaagaaaacgaagaccatcaaatgaattgtcacaatactcgaataatgcaagacacagaaaaggatgataacaataatgacgaatatgacaattacgatgaactggtggccaagtcattgttaaacctcggcaaaatcgctgaggatgcagcctaccgggccaggactgagtcagaaatgaacagcaatacctccaatagtctggaagacgatagtgacaaaaacgaaaacctgggtcggaaaagtgagttgagtttagacttagacagtgatgttgttagagaaacagtggactcccttaaactattagcccaaggacacggtgttgtgctctcagaaaacatgaatgacagaaattatgcagacagcatgtcgcagcaagacagtagaaatatgaattacgtcatgttggggaagcccatgaacaacggactcatggaaaagatggtggaggagagcgatgaggaggtgtgtctgagcagtctggagtgtttgaggaatcagtgcttcgacctggccaggaagctcagtgagaccaacccgcaggagaggaatccgcagcagaacatgaacatccgtcagcatgtccggccagaagaggacttcccaggaaggacgccggacagaaactactcggacatgctgaacctcatgcggctggaggagcagttgagcccccggtcgagagtgtttgccagctgtgcgaaggaggatgggtgtcatgagcgggacgacgataccacctctgtgaactcggacaggtctgaagaggtgttcgacatgaccaaggggaacctgaccctgctggagaaagccatcgctttggaaacggaaagagcaaaggccatgagggagaagatggccatggaagctgggaggagggacaatatgaggtcatatgaggaccagtctccgagacaacttcccggggaggacagaaagcctaaatccagtgacagccatgtcaaaaagccatactatgatccctcaagaacagaaaagaaagagagcaagtgtccaacccccgggtgtgatggaaccggccacgtaactgggctgtacccacatcaccgcagcctgtccggatgcccgcacaaagatagggtccctccagaaatccttgccatgcatgaaagtgtcctcaagtgccccactccgggctgcacggggcgcgggcatgtcaacagcaacaggaactcccaccgaagcctctccggatgcccgatcgctgcagcagagaaactggccaaggcacaggaaaagcaccagagctgcgacgtgtccaagtccagccaggcctcggaccgcgtgctcaggccaatgtgctttgtgaagcagctggagattcctcagtatggctacagaaacaatgtccccacaactacgccgcgttccaacctggccaaggagctcgagaaatattccaagacctcgtttgaatacaacagttacgacaaccatacttatggcaagcgagccatagctcccaaggtgcaaaccagggatatatcccccaaaggatatgatgatgcgaagcggtactgcaaggaccccagccccagcagcagcagcaccagcagctacgcgcccagcagcagcagcaacctgagctgcggcgggggcagcagcgccagcagcacgtgcagcaagagcagcttcgactacacgcacgacatggaggcggcccacatggcggccaccgccatcctcaacctgtccacgcgctgccgcgagatgccgcagaacctgagcaccaagccgcaggacctgtgcgccacgcggaaccctgacatggaggtggatgagaacgggaccctggacctcagcatgaacaagcagaggccgcgggacagctgctgccccatcctgacccctctggagcccatgtccccccagcaacaggcagtgatgaacaaccggtgtttccagctgggcgagggcgactgctgggacttgcccgtagactacaccaaaatgaaaccccggaggatagacgaggacgagtccaaagacattactccagaagacttggacccattccaggaggctctagaagaaagacggtatcccggggaggtgaccatcccaagtcccaaacccaagtaccctcagtgcaaggagagcaaaaaggacttaataactctgtctggctgccccctggcggacaaaagcattcgaagtatgctggccaccagctcccaagaactcaagtgccccacgcctggctgtgatggttctggacatatcaccggcaattatgcttctcatcggagcctttcaggttgcccaagagcaaagaaaagtggtatcaggatagcacagagcaaagaagataaagaagatcaagaacccatcaggtgtccggtccccgggtgcgacggccagggccacatcactgggaagtacgcgtcccatcgcagcgcctccgggtgccccttggcggccaagaggcagaaagacgggtacctgaatggctcccagttctcctggaagtcggtcaagacggaaggcatgtcctgccccacgccagggtgcgacggctcaggccacgtcagcggcagcttcctcacacaccgcagcttgtcaggatgcccgagagccacgtcagcgatgaagaaggcaaagctttctggagagcagatgctgaccatcaaacagcgggccagcaacggtatagaaaatgatgaagaaatcaaacagttagatgaagaaatcaaggagctaaatgaatccaattcccagatggaagccgatatgattaaactcagaactcagattaccacgatggagagcaacctgaagaccatcgaagaggagaacaaagtgattgagcagcagaacgagtctctcctccacgagctggcgaacctgagccagtctctgatccacagcctggctaacatccagctgccgcacatggatccaatcaatgaacaaaattttgatgcttacgtgactactttgacggaaatgtatacaaatcaagatcgttatcagagtccagaaaataaagccctactggaaaatataaagcaggctgtgagaggaattcaattcaggtctgaacagctgctgtagtgatgaaactcttgcttaaaaaggatgcctcttgttttttgctgctgtaacttaccagaaagtgttctatatttatttctgtttgaatttgaaacagtgttatgcttacaagacttcataatgattttatgtcttgctttaaagatagtacctgcagaatagtttttgaatacacccacattttgtacgtttccatgtaagctgacatagtgttctgccatgtaatgtttatagctgctgatgtatgcacatttgggggtatatctatttctgaagaggtaagctgatcaaaataaatagagtgtaaattctttttaatgctttagtgattaaatgttttagtattttgaactgaaatggacacacaaacacacacacgcacacacagacccacagctttgaatgatcatgttgtggctgagcagccgctttttagacgttatcattttgcctcatgttggaggactttatggaatttaagaaatacattttgtgtgcatattgtttcatagcaagaattcgttgcaaaaatgctttatttttgaacaatgcttggaaatattatgtgacttttttgtttgtttgttttaggaggatggtgtatggtgggggcaataaatgaggttttttgcattccaaggaaatggcatatggattaactgtaagaaatgaaataagtaatttattgtaagacaacatcaagccatggaaacttggcagaagattcaaagcagcttaaacagcacttttaaattaactcctaagcgttacatggttgtgactatggaaactccagttaagacaggatcttatcagaggtggacaacgtgaagatttccttttccattttcaataaactttggaacaaccttctcgtatctcccctagagtttcgtgcccctctgaactgtctgttattgcaatgtagtttatcaacagaatttgtgtgttttcgatttaagctaaaagataatttaagaacatttatttccccttttcactttaaaaaattatgattattcctattattgttatgaaccttcttattttacatttgagggataaaggcaaatgatttgtgagtcttctagttactggaccgagttttctgctggatctggtgggaaggcagctcggtaaagtttccctcctgctccccccgcccgactttgactctgaatcagcatttggtcctattcagaggactcttaccacgacgtttctgttctacacttgggtggagaccagttgaccatagagcatttgcagagcctcattgtttgatttcttgtgactattctaagaatgaatgcaatcagattttaaaagtaactaaatatacttcagcacttttttgctttaaactagatcatcttagacttgtttataccttccagatttgattgttttactcccaatgactgcactatatgtatgcataagaccacttttgagcgctgtgttcccccttctgagtagtcctttgacgacgtgttgtgttttctgatgttgacttgagttccatttagtagcatctcttccttccatgtcttgatgttatgcaggaagtacagacgtactttaaatttttgttatgaaataaaaaaaagatgggttttgtaaaaataaaaaaaaaatatttttagcagaacaggacttacagggtcattgtccccacaatgtgccagtcgactatttgcacttaccttgtcctatatatccgtacggaggtgtgcaattcctcgtgtcagtagccttgtgacactgaacctggatggattatagaggagccctcacggctgatcaataatgttgcaaagggagactacagggatctcacgacgaatattctgatacaatactcaacctcggtatatatatatgtgtataaatatatgtatatcccagcggcactttatactgttcactgtacaaaagcttacagttttccacaaggactttaataactagctgggaaaagacgatgtaattatttcggggctctgcggaaccttctctgtacagcgccccctttctgttgtgctattggttgcagctgccatgctcagaatgcgttttgagagctgaagcaaggtgcttgcagtcacctgaggccgtccgtgtggcccagggccccagctgcctttagggcccccattgttcataacagcatatgcatttccccaccgcgttgtgtctgcagcttctttgccaatatagtaatgcttttagtagagtactagatagtatcagttttggattcttattgttatcacctatgtacaatggaaagggattttaagcacaaacctgctgctcatctaacgttggtacataatctcaaatcaaaagttatctgtgactattatatagggatcacaaaagtgtcacatattagaatgctgacctttcatatggattattgtgagtcatcagagtttattataacttattgttcatattcatttctaagttaatttaagtaatcatttattaagacagaattttgtataaactatttattgtgctctctgtggaactgaagtttgatttatttttgtactacacggcatgggtttgttgacactttaattttgctataaatgtgtggaatcacaagttgctgtgatacttcatttttaaattgtgaactttgtacaaattttgtcatgctggatgttaacacatcttactctaaataaacaaggtgttgccacatttgtagcacgaaggatctctaaaaaaaaaaaa

SEQ ID NO: 55 - DNA, 3062 bp, Homo sapiens
  CDS (1)..(2136)
atggagggcagtgggaccggaaaaagacgtggaaaagctgcgaaaacgagccttcgaatcatggacgcgcgggcccagctcctcctccgagttcctcatccggggccgtcactcacatccggggccctcactcacatccgggaccctcatccggggctctcacccacatccgggaccctcatgcctgggcggaggagggggggccctcattcgggaccctgcactccgtcgccggaagtgccaccgagaagcgccggcctcggggctgtctacagcggcccgggagaggctgtggtggccccgagcgcgagtgtagcagtgatggaggaaataccagcccaggaagcagcagggtcaccaagggtccagtttcagtctttggagacccagtctgagtgtctgtccccagagcctcagtttgtgcaggacaccgacatggaacgtggtctcactggggctccacctgttcctcaggtgcctgctcttccccgtgagggaagcccaggagaccaggcagctgcgctcttgacagccaggtaccagagcagccaggatgtgttatttcaggagtttgtgacattcgaggatgtggctgtgcaccttactcgagaggaatggggatacctggaccctgttcagagggacctctacagagaagtgatgttagagaattatgggaacgtggtctcactgggatttccaatttccaagcctgatgggatctcccagctggaacaggatctacaggtctttgatctggaaactaagactagagaagtcttaagagatgactgctcagatggagagaccagagaagagaacaagctgttgattcctaagcagaaaatttcggaagaagtgcattcatacaaagtgagagtaggaagactcaaacacgatattacccaagttcctgagactagagaagtgtataagtctgaggacagattagaaagacttcaggaaattctaaggaaatttctgtacctggagagagagtttaggcaaataacaatcagcaaggaaaccttcaccagtgagaagaacaatgaatgtcatgaacccgaaaaaagcttcagtctggactctactattgatgcagatcagagagttcttagaatacagaataccgatgacaatgataagtatgacatgagcttcaaccagaattcagcctctggtaaacatgaacacttaaatctaacagaggattttcagagtagtgaatgtaaggaaagcttaatggatctctcccaccttaataaatgggagagcatccctaacactgagaaatcctataaatgtgatgtatgtgggaaaattttccatcagagctcagcccttactagacatcagagaatccatactagagagaagccctacaaatgtaaagaatgtgaaaagtctttcagtcagagctcaagtcttagtcgacataaaagaatacacactagagaaaaaccttacaaatgtgaagcatctgataaatcctgtgaagcgtctgataaatcctgtagtccaagctcaggcataattcagcataagaaaattcacaccagagccaaatcttacaaatgtagcagttgtgaaagagtcttcagtcgtagtgtccaccttactcaacatcagaaaattcacaaagagatgccctgtaagtgtactgtatgtggcagtgacttctgccatacttcatacctacttgaacatcagagggtccatcatgaagagaaagcctatgagtatgatgaatatgggttggcctatattaaacaacaaggaattcatttcagagaaaagccctatacgtgtagtgaatgtggaaaagacttcagattgaattcacatcttattcagcatcaaagaattcacacaggagagaaagcacatgaatgtaatgaatgtggaaaagctttcagtcaaacctcatgccttattcagcatcacaaaatgcataggaaagagaaatcgtatgaatgtaatgagtatgagggcagtttcagtcatagctcagatcttatcctgcaacaagaagtcctcaccagacagaaagcctttgattgtgatgtatgggaaaagaactccagtcagagagcacatctagttcaacatcagagcattcataccaaagagaactcatgaatgtaatgaagatgggaagatatttatcaaattcaggcttcattcagcatctgagagttcacaccagggagaaatcatgtatgtactgcatgtggtaaagccttcagtcatagctcagccattgctcagcatcagataattcacaccagagagaaaccctctgaatgtgacgaatgaagaaaaggtattagtgttaaactcttaatcgactcctgcaaatctataccagtgagaaatcttacaaatgtattgaatgtggcaaatttttcatgctattagtattttcataccttagtcacatttggagaattcacatgggaataaaattccattgctgcaatgaatgtgaaaaagccatcagtcaaagaaactaccttgtttagtatcaaattcacgccatgcaaaaagattataaatgtaataagcatgtatgtgtgtgaggagattcagtcataacccaacgctcattcaacatcaaagaatttatacctaagagaacttatttgggtgtagtaaatggcagatctttcaataggagtttaactagtctttgtcatatcagaatatccatagtagacaagaatttgatgtaacgcaaatggaaaaactcgacaccacatttcaggctttacccaacatcgaaataatggagagaaaattgttgattatttgtttatgaaattgttaatacatagtcccaatctttttcattgcacaaaaatctagggttgacttggtaaatgcagtgacattttctcatggagttcctttatttaatatgtattctaagtaggtacgtttatttttacttttttattataattttgatattaaaaagaacagagatggggtcttgctttgttgcccaggctggtcttgaactcctggcctcaagcgatcctcccacctgtcctcccaaagtg

SEQ ID NO: 56 - DNA, 719 bp, Homo sapiens
  CDS (378)..(680)
aattcgcggccgcgtcgaccacgaggcgatttgtgggccataccaaggatgtgctgagtgtggccttctcctctgacaaccggcagattgtctctggatctcgagataaaaccatcaagctatggaataccctgggtgtgtgcaaatacactgtccaggatgagagccactcagagtgggtgtcttgtgtccgcttctcgcccaacagcagcaaccctatcatcgtctcctgtggctgggacaagctggtcaaggtatggaacctggctaactgcaagctgaagaccaaccacattggccacacaggctatctgaacacggtgactgtctctccagatggatccctctgtgcttctggaggcaaggatggccaggccatgttatgggatctcaacgaaggcaaacacctttacacgctagatggtggggacatcatcaacgccctgtgcttcagccctaaccgctactggctgtgtgctgccacaggccccagcatcaagatctgggatttagagggaaagatcattgtagatgaactgaagcaagaagttatcagtaccagcagcaaggcagaaccaccccagtgcacctccctggcctggtctgctgatggccagactctgtttgctggctacacggacaacctggtgcgagtgtggcaggtgaccattggcacacgctagaagtttatggcagagctttacaaataaaaaaaaaaa

SEQ ID NO: 57 - DNA, 1730 bp, Homo sapiens
  CDS (234)..(1355)
gcacgagcccggctggtgtgtgtcggtgtgtatgtgtgtgtgtgagtgtgcgcgctccgagtgtgtgtgtatttgtgtatcggcggtcccgcaggtcccggatgttgcggacagtatgaggcaagcgcagggggacggggaccagcagctgtcgccgccgctctcagggtgaagagggaacagaaatctttgccccctgactttggaaatctcgtttaaccttcaaactggcgatgtcaagggttccaagtcctccacctccggcagaaatgtcgagtggccccgtagctgagagttggtgctacacacagatcaaggtagtgaaattctcctacatgtggaccatcaataactttagcttttgccgggaggaaatgggtgaagtcattaaaagttctacattttcatcaggagcaaatgataaactgaaatggtgtttgcgagtaaaccccaaagggttagatgaagaaagcaaagattacctgtcactttacctgttactggtcagctgtccaaagagtgaagttcgggcaaaattcaaattctccatcctgaatgccaagggagaagaaaccaaagctatggagagtcaacgggcatataggtttgtgcaaggcaaagactggggattcaagaaattcatccgtagagattttcttttggatgaggccaacgggcttctccctgatgacaagcttaccctcttctgcgaggtgagtgttgtgcaagattctgtcaacatttctggccagaataccatgaacatggtaaaggttcctgagtgccggctggcagatgagttaggaggactgtgggagaattcccggttcacagactgctgcttgtgtgttgccggccaggaattccaggctcacaaggctatcttagcagctcgttctccggtttttagtgccatgtttgaacatgaaatggaggagagcaaaaagaatcgagttgaaatcaatgatgtggagcctgaagtttttaaggaaatgatgtgcttcatttacacggggaaggctccaaacctcgacaaaatggctgatgatttgctggcagctgctgacaagtatgccctggagcgcttaaaggtcatgtgtgaggatgccctctgcagtaacctgtccgtggagaacgctgcagaaattctcatcctggccgacctccacagtgcagatcagttgaaaactcaggcagtggatttcatcaactatcatgcttcggatgtcttggagacctctgggtggaagtcaatggtggtgtcacatccccacttggtggctgaggcataccgctctctggcttcagcacagtgcccttttctgggacccccacgcaaacgcctgaagcaatcctaagatcctgcttgttgtaagactccgtttaatttccagaagcagcagccactgttgctgccactgaccaccaggtagacagcgcaatctgtggagcttttactctgttgtgaggggaagagactgcattgtggccccagacttttaaaacagcactaaataacttgggggaaacggggggagggaaaatgaaatgaaaaccctgttgctgcgtcactgtgttccctttggcctggctgagtttgatactgtggggattcagtttaggcgctggcccgaggatatcccagcggtggtacttcggagacacctgtctgcatctgactgagcagaacaaatcgtcaggtgcctggagcaaaaaggaaaaaaaaaaaa

SEQ ID NO: 58 - DNA, 1743 bp, Homo sapiens
  CDS (142)..(1551)
gcggcggcgaggggaaagggagcgcgggggctgggtggaatcgaggagtgaggaaaaagggaaggggcgggggagagggaccagggaaggcgtcggggggaatctcgcgagggttggagttttggcgagagtttgtggaagatggcgcctgttgtgacagggaaatttggtgagcggcctccacctaaacgacttactagggaagctatgcgaaattatttaaaagagcgaggggatcaaacagtacttattcttcatgcaaaagttgcacagaagtcatatggaaatgaaaaaaggtttttttgcccacctccttgtgtatatcttatgggcagtggatggaagaaaaaaaaagaacaaatggaacgcgatggttgttctgaacaagagtctcaaccgtgtgcatttattgggataggaaatagtgaccaagaaatgcagcagctaaacttggaaggaaagaactattgcacagccaaaacattgtatatatctgactcagacaagcgaaagcacttcatgttgtctgtaaagatgttctatggcaacagtgatgacattggtgtgttcctcagcaagcggataaaagtcatctccaaaccttccaaaaagaagcagtcattgaaaaatgctgacttatgcattgcctcaggaacaaaggtggctctgtttaatcgactacgatcccagacagttagtaccagatacttgcatgtagaaggagtggatgatgatgaatcagaaggagaagaattcacagtccgagatggctacatccattatggacaaacagtcaaacttgtgtgctcagttactggcatggcactcccaagattgataattaggaaagttgataagcagaccgcattattggatgcagatgatcctgtgtcacaactccataaatgtgcattttaccttaaggatacagaaagaatgtatttgtgcctttctcaagaaagaataattcaatttcaggccactccatgtccaaaagaaccaaataaagagatgataaatgatggcgcttcctggacaatcattagcacagataaggcagagtatacattttatgagggaatgggccctgtccttgccccagtcactcctgtgcctgtggtagagagccttcagttgaatggcggtggggacgtagcaatgcttgaacttacaggacagaatttcactccaaatttacgagtgtggtttggggatgtagaagctgaaactatgtacaggtgtggagagagtatgctctgtgtcgtcccagacatttctgcattccgagaaggttggagatgggtccggcaaccagtccaggttccagtaactttggtccgaaatgatggaatcatttattccaccagccttacctttacctacacaccagaaccagggccgcggccacattgcagtgcagcaggagcaatccttcgagccaattcaagccaggtgccccctaacgaatcaaacacaaacagcgagggaagttacacaaacgccagcacaaattcaaccagtgtcacatcatctacagccacagtggtatcctaactaccgtctttttgctaggacttaaactgacttgagtgtggcaaaaagttaacaaaaaaggagaaaaaatgaacaatcgtttgtggtttcttgggaaaacttttcataccaggtgatactattcaaaaaccccgttgtctccctgcaagtgctgatttgaaatgcagaagccacagtaaaaaaaaaaaa

SEQ ID NO: 59 - DNA, 582 bp, Homo sapiens
  CDS (48)..(479)
ggtccggcgcccagagctaacgggagtcccaggttaaacactttaagatgagaaaaattgatctctgtctgagctctgaagggtccgaagtgattttagctacatcaagtgatgaaaaacacccacctgaaaatatcattgatgggaatccagaaacgttttggaccaccacaggaatgtttccccaggaattcattatttgtttccacaaacatgtaaggattgaaaggcttgtaatccaaagttactttgtacagaccttgaagattgaaaaaagcacgtctaaagagccagttgattttgagcaatggattgaaaaagatttggtacacacagaggggcagcttcaaaatgaagaaattgtggcacatgatggctccgctacttacttgagattcattattgtatcagcctttgatcattttgcatctgtgcatagcgtttctgcagaaggaacagtagtctcaaatctttcctcataatgataacaaaatgctcttgcatgattttttaacaatatatttaaacaggaagttgtcactgatatactttattaaaaggatttttatcaaaaaaaaaaaa

SEQ ID NO: 60 - DNA, 518 bp, Homo sapiens
  CDS (53)..(415)
cggaaggtccggcgcccagagctaacgggagtcccaggttaaacactttaagatgagaaaaattgatctctgtctgagctctgaagggtccgaagtgattttagctacatcaagtgatgaaaaacacccacctgaaaatatcattgatgggaatccagaaacgttttggaccaccacaggaatgtttccccaggaattcattatttgtttccacaaacatgtaaggattgaaaggcttgtaatccaaagttactttgatttggtacacacagaggggcagcttcaaaatgaagaaattgtggcacatgatggctccgctacttacttgagattcattattgtatcagcctttgatcattttgcatctgtgcatagcgtttctgcagaaggaacagtagtctcaaatctttcctcataatgataacaaaatgctcttgcatgattttttaacaatatatttaaacaggaagttgtcactgatatactttattaaaaggatttttatcaaaaaaaaaaaa

SEQ ID NO: 61 - DNA, 439 bp, Homo sapiens
  CDS (33)..(281)
gttgtggcggttgctggtcagtaacagccaagatgctgcggaatctgctggctcttcgtcagattgggcagaggacgataagcactgcttcccgcaggcattttaaaaataaagttccggagaagcaaaaactgttccaggaggatgatgaaattccactgtatctaaagggtggggtagctgatgccctcctgtatagagccaccatgattcttacagttggtggaacagcatatgccatatatgagctggctgtggcttcatttcccaagaagcaggagtgacttcagtcatcccagcaatcgcttggttcagtttcattcagctctctatggaccagtaatctgataaataaccgagctcttctttggggatcaatatttattgacttgtagtaactgccaccaataaagcagtctttaccatgaaaaaaaaaaaa

SEQ ID NO: 62 - DNA, 1233 bp, Homo sapiens
  CDS (353)..(823)
ggaattcccctaaaccaccagtgaaccccactgctctccagatgaggtcgcaaggaccaaccagtgcctacccgcccatgctcccccgaaactgggaactgacagcccagcccctccaaagccccttcctccagcttcagctgccaggtcagcaagggtgaggccggaagcaggcgggtgactcaccctgggcacctccgagcctcagtttccccatggatgcaacctgaggcctcctcactgagtcaaaaccgagacgcctctggtccccggagaggctgctggctctggggaaaggagagagcagcccagtgtgacagagcgagtccccacggctctgggagtgcctcgcatgtgtgtggcccaggtcctgacagcccacctactccctccccggcaggcactgggctccctctgctccccgtgggccgctccccgcgtggggccactgcccccggcccccgccatggtgcggatttcaaagcccaagacgtttcaggcctacttggatgattgtcaccggaggtatagctgtgcccactgccgcgctcacctggccaaccacgacgacctcatctccaagtccttccagggcagtcaggggcgtgcctacctcttcaactcagtggtgaacgtgggctgcgggccagccgaggagcgggtgctgctgaccggcctccatgctgtcgccgacatccactgcgagaactgcaagaccactttgggctggaaatatgaacaggcctttgagagcagccagaagtacaaagaggggaagtacatcattgaactcaaccacatgatcaaagacaacggctgggactgacccccgctcccccgacgcatgtggctccagcccggcctggccgccagggagcgccactggcttcccgccacccgaagggagctctggaccctcagagcccctgcagaggacggatctagctcctgtatatatattttattgcatgcactgtgaccttggggggagaacagaagggggacgacgcccccgcacctcctgcgatctggctggcttggatctcgtttttaacccgttcctgccccacctgccctatagttatggcctgtgttctgctctcctggtcccagtgcaccgtctgctctgtgaactcctcccaccaggcccttcttaccccacgcgtgtctgtccccctcgttctgtagcgtttgtacataataaaacaatggagtggagacaaaaaaaaaaaa

SEQ ID NO: 63 - DNA, 1076 bp, Homo sapiens
  CDS (11)..(856)
ggttgggaagatggcgaggcgaggctgggcgcagacaggctggggctgcggccaagcgtggggtgcgtcggggggcggccgcagctgcgaggagctcactgcggtcctaaccccgccgcagctcctcggacgcaggtttaacttctttattcaacaaaaatgcggattcagaaaagcacccaggaaggttgaacctcgaagatcagacccagggacaagtggtgaagcatacaagagaagtgctttgattcctcctgtggaagaaacagtcttttatccttctccctatcctataaggagtctcataaaacctttattttttactgttgggattaacaagtggtggaataacctaagtgatggccagcggactgtgacaggtattatagctgcaaatgtccttgtattctgtttatggagagtaccttctctgcagcggacaatgatcagatatttcacatcgaatccagcctcaagtgttatttccaattttgtcagttacgtgggtaaagttgccacaggaagatatggaccatcacttggtgcatctggtgccatcatgacagtcctcgcagctgtctgcactaagatcccagaagggaggcttgccattattttccttccgatgttcacgttcacagcagggaatgccctgaaagccattatcgccatggatacagcaggaatgatcctgggatggaaattttttgatcatgcggcacatcttgggggagctctttttggaatatggtatgttacttacggtcatgaactgatttggaagaacagggagccgctagtgaaaatctggcatgaaataaggactaatggccccaaaaaaggaggtggctctaagtaaaactgggattggacagtagtggtgcatctggtccttgccgcctgagagccccaggagacatcggctagagtgaccatggctatgctcccgtctggaagatgccagcatctggcctcccactgttttcagctgtgtcccccagtccgtgtctttttagaatgtgaatgatgataaagttgtgaaataaaggtttctatctagtttgtaaaaaaaaaaa

SEQ ID NO: 64 - DNA, 1043 bp, Homo sapiens
  CDS (84)..(683)
tccccggccggtcgacctcctgcagcgtctggggtttccgttgcagtcctcggaaccaggacctcggcgtggcctagcgagttatggcgacgaaggccgtgtgcgtgctgaagggcgacggcccagtgcagggcatcatcaatttcgagcagaaggcaagggctgggacggaggcttgtttgcgaggccgctcccacccgctcgtccccccgcgcacctttgttaggagcgggtcgcccgccaggcctcggggccgccctggtccagcgcccggtcccggcccgtgccgcccggaaagtaatggaccagtgaaggtgtggggaagcattaaaggactgactgaaggcctgcatggattccatgttcatgagtttggagataatacagcaggctgtaccagtgcaggtcctcactttaatcctctatccagaaaacacggtgggccaaaggatgaagagaggcatgttggagacttgggcaatgtgactgctgacaaagatggtgtggccgatgtgtctattgaagattctgtgatctcactctcaggagaccattgcatcattggccgcacactggtggtccatgaaaaagcagatgacttgggcaaaggtggaaatgaagaaagtacaaagacaggaaacgctggaagtcgtttggcttgtggtgtaattgggatcgcccaataaacattcccttggatgtagtctgaggccccttaactcatctgttatcctgctagctgtagaaatgtatcctgataaacattaaacactgtaatcttaaaagtgtaattgtgtgactttttcagagttgctttaaagtacctgtagtgagaaactgatttatgatcacttggaagatttgtatagttttataaaactcagttaaaatgtctgtttcaatgacctgtattttgccagacttaaatcacagatgggtattaaacttgtcagaatttctttgtcattcaagcctgtgaataaaaaccctgtatggcacttattatgaggctattaaaagaatccaaattcaaaaaaaaaaaa

SEQ ID NO: 65 - DNA, 849 bp, Homo sapiens
  CDS (54)..(788)
gggtcgacccacgcgtccgagtaggcagagagcggacctggcggccgggcagcatggcggggctggagctcttgtcggaccagggctaccgggtggacgggcggcgcgccggggagctgcgcaagatccaggcgcggatgggcgtgttcgcgcaggctgacggctcggcctacattgagcagggcaacaccaaggcactggctgtggtctacggcccgcacgagatccggggctcccgggctcgagccctgccggacagggccctagtgaactgtcaatatagttcagcgaccttcagcacaggtgagcgcaagcgacggccacatggggaccgtaagtcctgtgagatgggcctgcagctccgccagactttcgaagcagccatcctcacacagctgcacccacgctcccagattgatatctatgtgcaggtgctacaggcagatggtgggacctatgcagcttgtgtgaatgcagccacgctggcagtgctggatgccgggatacccatgagagactttgtgtgtgcgtgctcagctggcttcgtggacggcacagccctggcggacctcagccatgtggaggaagcagctggtggcccccagctggccctggccctgctgccagcctcaggacagattgcgctgcttgagatggatgcccggctgcacgaggaccacctggagcgggtgttggaggctgctgcccaggctgcccgagatgtgcacaccctcttagatcgagtggtccggcagcatgtgcgtgaggcctctatcttgctgggggactgaccacccagccacccatgtccagaataaaaccctcctctgcccacacaaaaaaaaaaaa

SEQ ID NO: 66 - DNA, 3260 bp, Homo sapiens
  CDS (29)..(3226)
gccaaactccgagtcgttcctctggtggatggcctgctggcgtgccgatgtctgttgtgtgctcttccgccagcattctcccttcaacgtcctctggacgtccagctgcttgtatgttcttccgccgatgtgttcctctcgacgtccagccgctttgaatttcataaaggacaatagccgagcccttattcaaagaatgggaatgactattataaagcaaatcacagatgacctatttgtatggaatgttctgaatcgcgaagaagtaaacatcatttgctgcgagaaggtggagcaggatgctgctagggggatcattcacatgattttgaaaaagggttcagagtcctgtaacctctttcttaaatcccttaaggagtggaactatcctctatttcaggacttgaatggacaaagtctttttcatcagacatcagaaggagacttggacgatttggctcaggatttaaaggacttgtaccataccccatcttttctgaacttttatccccttggtgaagatattgacattatttttaacttgaaaagcaccttcacagaacctgtcctgtggaggaaggaccaacaccatcaccgcgtggagcagctgaccctgaatggcctcctgcaggctcttcagagcccctgcatcattgaaggggaatctggcaaaggcaagtccactctgctgcagcgaattgccatgctctggggctccggaaagtgcaaggctctgaccaagttcaaattcgtcttcttcctccgtctcagcagggcccagggtggactttttgaaaccctctgtgatcaactcctggatatacctggcacaatcaggaagcagacattcatggccatgctgctgaagctgcggcagagggttcttttccttcttgatggctacaatgaattcaagccccagaactgcccagaaatcgaagccctgataaaggaaaaccaccgcttcaagaacatggtcatcgtcaccactaccactgagtgcctgaggcacatacggcagtttggtgccctgactgctgaggtgggggatatgacagaagacagcgcccaggctctcatccgagaagtgctgatcaaggagcttgctgaaggcttgttgctccaaattcagaaatccaggtgcttgaggaatctcatgaagacccctctctttgtggtcatcacttgtgcaatccagatgggtgaaagtgagttccactctcacacacaaacaacgctgttccataccttctatgatctgttgatacagaaaaacaaacacaaacataaaggtgtggctgcaagtgacttcattcggagcctggaccactgtggagacctagctctggagggtgtgttctcccacaagtttgatttcgaactgcaggatgtgtccagcgtgaatgaggatgtcctgctgacaactgggctcctctgtaaatatacagctcaaaggttcaagccaaagtataaattctttcacaagtcattccaggagtacacagcaggacgaagactcagcagtttattgacgtctcatgagccagaggaggtgaccaaggggaatggttacttgcagaaaatggtttccatttcggacattacatccacttatagcagcctgctccggtacacctgtgggtcatctgtggaagccaccagggctgttatgaagcacctcgcagcagtgtatcaacacggctgccttctcggactttccatcgccaagaggcctctctggagacaggaatctttgcaaagtgtgaaaaacaccactgagcaagaaattctgaaagccataaacatcaattcctttgtagagtgtggcatccatttatatcaagagagtacatccaaatcagccctgagccaagaatttgaagctttctttcaaggtaaaagcttatatatcaactcagggaacatccccgattacttatttgacttctttgaacatttgcccaattgtgcaagtgccctggacttcattaaactgggcttttatgggggagctatggcttcatgggaaaaggctgcagaagacacaggtggaatccacatggaagaggccccagaaacctacattcccagcagggctgtatctttgttcttcaactggaagcaggaattcaggactctggaggtcacactccgggatttcagcaagttgaataagcaagatatcagatatctggggaaaatattcagctctgccacaagcctcaggctgcaaataaagagatgtgctggtgtggctggaagcctcagtttggtcctcagcacctgtaagaacatttattctctcatggtggaagccagtcccctcaccatagaagatgagaggcacatcacatctgtaacaaacctgaaaaccttgagtattcatgacctacagaatcaacggctgccgggtggtctgactgacagcttgggtaacttgaagaaccttacaaagctcataatggataacataaagatgaatgaagaagatgctataaaactagctgaaggcctgaaaaacctgaagaagatgtgtttatttcatttgacccacttgtctgacattggagagggaatggattacatagtcaagtctctgtcaagtgaaccctgtgaccttgaagaaattcaattagtctcctgctgcttgtctgcaaatgcagtgaaaatcctagctcagaatcttcacaatttggtcaaactgagcattcttgatttatcagaaaattacctggaaaaagatggaaatgaagctcttcatgaactgatcgacaggatgaacgtgctagaacagctcaccgcactgatgctgccctggggctgtgacgtgcaaggcagcctgagcagcctgttgaaacatttggaggaggtcccacaactcgtcaagcttgggttgaaaaactggagactcacagatacagagattagaattttaggtgcattttttggaaagaaccctctgaaaaacttccagcagttgaatttggcgggaaatcgtgtgagcagtgatggatggcttgccttcatgggtgtatttgagaatcttaagcaattagtgttttttgactttagtactaaagaatttctacctgatccagcattagtcagaaaacttagccaagtgttatccaagttaacttttctgcaagaagctaggcttgttgggtggcaatttgatgatgatgatctcagtgttattacaggtgcttttaaactagtaactgcttaaataaagtgtactcgaagccaaaaaaaaaaaa

SEQ ID NO: 67 - DNA, 853 bp, Homo sapiens
  CDS (409)..(684)
ctctgtttccacatgctttctccagtataggatttctcagccttttcactattgacaattttggctggataatcctttgttgtggaggagctctcctgggcattgcagatgttaggaagaattcctggcctctttgcccagatccaaaatctgggcaaagaaaaaatcttctggaaagaattcagcattctagatgccaataaaaacactgatgtttcatggaaggagatcaaaatagcaacattaacaggggtctggaagaagttgattctgacttttgaaactgtcagtttcaaaatttcattgtaggaagtaactgtggatgtggtagaaacagcaagagaacttgaattagaagtgaaccctgaaaatgtgactagattgctgctatctcatgatcaaatttaaatggatgaggagttgcttcatagggatgaacaaagaaagtggtttcttgagatgagatctactcctggtgaagatgctgcgaacaacgttgaaatgacaacaaaggacttaaactatgacagaaacttagttgataaagcagtggtagggtttgaaaggactgactccaattttgaaagaagttgtactgtgggtaaacagcattgcatgatacagagaaattgttcatggaaagaagagtacatggatgcagcaaacttcattgttgtcttattttaagaaattgccacagccactccatccttcagcaaccaccaccctggtctattagaaaccatcaatatcaaggcaagattctccaccaacaaaaagctatgactcactgatggctcagatgatcattagcatttttcagcaataaagtatttctacattaaaaaaaaaa

SEQ ID NO: 68 - DNA, 2727 bp, Homo sapiens
  CDS (1)..(2439)
atgaggagagaccccacgccgcccaggggcctcccgcggcagaggccgacgccgagcccaaggacacgctcccggggacaccaaagccaaaggccaaaggccaagtccgagccccagcccgcgcccgcggcgacccccggaggccgaagggcgtgggaaccacgggcgcaagccggctgcccacccccgccccgggccgcctctcccaggagattagtgcagggcgagcggccggaatccgggaaccgtagccgacaggcagcttacccacgccgcgccagccgggcacgaacctgcacaacgcgacttccaccaaccttgcgccagcgcgcactgacgcagcgcccatgctcggtacccaggaccaatagaaagctccgaaggggacctgggccaatcacattgcgccgccctgagtcgtgctcccgccccgcgtttgctacggaggcccacgacgcccaggcgcttccgcgaccacccggagtgattgcccggcagagcgcgatgcatagagctctggctgctttaaaaaataaacctctaaatcatgttcacaaggtagtcaaggagcgtctgtgcccttggttgtgttcacgacaacctgagcctttcggggtcaaattccatcatgcccattgtaaaaagtttcattcgaaaaatggaaatgaccttcatccactcggtggaccagtgttctctcaagtatctgactgcgacaggcttgaacaaaatgttaaaaatgaggagagtcagatgttttacaggagactgagcaacttgacttcatcagaagaagtgctaagttttataagcacgatggaaaccctgcctgacactatggcagcaggagctttacaacgaatttgtgaagtggaaaaaaaggatggtgatcaagggctgccaaaagaaatactggagaatagcatctttcaagctttatgctttcagtttgaaaaggagccctcacagctgtcaaacactagtttagtgactgctttgcaagctctgattctgttgcatgtggatcctcaaagtagcctgttgctgaacctggtggcagaatgccaaaatcgtctcagaaaaggtggcatggaagttcgcaatctttgtattcttggggaaagtctgattacactgcacagttcaggttgtgtgacactagaactcattataaatcaacttcaaggtgaaaaattggaaacatttaccccggaggatattgtggccctttatagaatcttgcaggcatgtactgaaaaagtggatgaacaccaaacatttttaaataagataaacaacttttccctatcaatagtttccaacctgagtcctaaattgattagccaaatgctcactgccctggtggttcttgatcaaagtcaagcatttcctctgattataaaattgggcaaatatgtcgtgaggcatgtcccacatttcactaacgaggagcttaggagagtcttggaggcgttcatatattttgggcaccatgacacattttttacaaaagccctagagcatcgtgtagctgcggtgtgcctcacgttggatcctgaagttgtctgcagggtcatggagtactgcagtagagaactgattctttcaaaacccatcctcaatgcagtggcagaaacttttgtttgccaaacagaaaaattttcacctcgtcagatttctgcgttaatggaaccatttgggaaactcaattatttgccaccaaatgcctctgctttatttagaaagctggaaaacgtgctattcactcatttcaattattttccacccaaatcattattgaaacttcttcattcatgttcacttaatgaatgccatccagtcaactttctggcaaaaatattcaagcctcttttccttcaacggctgcaaggtaaagaatctcatttggacacattgagtcgggcacaactgacccaacttttcttagcctcagtcctggaatgccctttctataagggtccaaaactccttcctaaatatcaagtgaagtcatttcttaccccatgctgttccctggagacccctgtggattctcagctttatagatatgtgaagattgggctgactaaccttttaggagcaagattatattttgctccaaaagtgttgacaccctattgttatacaatagatgttgaaattaaattagatgaagaaggatttgtattgccatccacagctaatgaagatatccataaaaggatagcactgtgtattgatggtccaaaaaggttttgctccaatagcaaacacttactggggaaagaagctattaaacaaagacacctacagttactcggttatcaagttgttcagatcccctatcatgagattgggatgctaaaatcaagacgtgaattggtggaatatttacaaagaaaactgttttctcaaaacactgttcattggttgcaagaatgaatactgacttcagaactcaaacaatggaagaacttgcatttttatggaactcagtattaaaagaaaaatataatgtgaattagccactttgcagaatatgttctagactggtgatctgaaagcatctgtagttttccttatactatgtatacatttattgtggtaaaatttaaaattaattttaatttaatactagtgtcatagatactttttgtacatcaaacaattgatcatgtgctgtaaaggaattcaatgaataaatgttatttttaagtaaaaaaaaaa

SEQ ID NO: 69 - DNA, 853 bp, Homo sapiens
  CDS (74)..(229)
aaattcgcggccgcgtcgacatggttctgtggtgcagtttaagattaagaggcatacaccacttagtaaactaatgaaagcctattgtgaacgacagggattgtcaatgaggcagatcagattccgatttgacgggcaaccaatcaatgaaacagacacacctgcacagttggaaatggaggatgaagatacaattgatgtgttccaacagcagacgggaggtgtctactgaaaagggaacctgcttctttactccagaactctgttctttaaagaccaagattacattctcaattagaaaactgcaatttggttccaccacatcctgactactaccgtatagttttctctattctttcatttcccccttccccattcctttattgtacataaagtaactggtatatgtgcacaagcatattgcatttttttttttttttaactaaacagccaatggtatgttttgattgacatcaagtggagacgggatggggaaaaatactgattctgtgaaaataccccctttctccattagtggcatgctcattcagctcttatctttatattccagtaagttattttgctctcactgttttaacaaaaaaaaaaaacaacaacataaaaatccttgcataccttgttcaattggagaattttaatgtttttcatttatcattgtaaaaccaaggacaattttataacttttttgtacgtagctgttacatgtagggcaatctgtctttaagtagggataaattactctaaaacaaaaaagaatcctagatagttttcccttcaagtcaagcgtcttgttgtttaaataaacttcttgtttaaaatgaaaaaaaaaaaa

SEQ ID NO: 70 - DNA, 2072 bp, Homo sapiens
  CDS (339)..(1544)
gcgaaaactcgcctctgcccaaggctgtgcggggcgtccgcccccgcacttcgctgattggccgcactagcccgctcgtcacgctcttttgtctcagctggcagaggataaaagccgccgcggctgccttaggaacggcgctgcctcgtctctgctacccctggttgggcggccctgcgaagcagctccttcgggcagccccgggtcgcttagcggccaaggaggcttcagttctttgccgcctgcaaggcggagaccagaaggcggaatccacagctggcgacgcgggagcatctgctgtccaccagcggagcacagataccctatcgtcgtcagtcatggctagcatcattgcacgtgtcggtaacagccggcggctgaatgcacccttgccgccttgggcccattccatgctgaggtccctggggagaagtctcggtcctataatggccagcatggcagacagaaacatgaagttgttctcggggagggtggtgccagcccaaggggaagaaacctttgaaaactggctgacccaagtcaatggcgtcctgccagattggaatatgtctgaggaggaaaagctcaagcgcttgatgaaaacccttaggggccctgcccgcgaggtcatgcgtgtgcttcaggcgaccaaccctaacctaagtgtggcagatttcttgcgagccatgaaattggtgtttggggagtctgaaagcagtgtgactgcccatggtaaattttttaacaccctacaagctcaaggggagaaagcctccctttatgtgatccgtttagaggtgcagctccagaacgctattcaggcaggcattatagctgagaaagatgcaaaccggactcgcttgcagcagctccttttaggcggtgagctgagtagggacctccgactcagacttaaggattttctcaggatgtatgcaaatgagcaggagcggcttcccaactttctggagttaatcagaatggtaagggaggaagaggattgggatgatgcttttattaaacggaagcgtccaaaaaggtctgagtcaatggtggagagggcagtcagccctgtggcatttcagggctccccaccgatagtgatcggcagtgctgactgcaatgtgatagagatagatgataccctcgacgactccgatgaggatgtgatcctggtggagtctcaggaccctccacttccatcctggggtgcccctcccctcagagacagggccagacctcaggatgaagtgctggtcattgattccccccacaattccagggctcagtttccttccaccagtggtggttctggctataagaataacggtcctggggagatgcgtagagccaggaagcgaaaacacacaatccgctgttcgtattgtggtgaggaaggccactcaaaagaaacctgtgacaacgagagtgacaaggcccaggtttttgagaatttgatcatcactctccaggagctgacccatactgagatggagaggtcaagagtggcccctggcgaatacaatgacttctctgagccactgtaagggaccacccccaggtttcagtgaacccttacctatattcagcatccagtagtgggaaaactggggtgggggtggggtgggacttctaactgcatgaattaatccacaaagcggctatcttttggggtggagtagaaagggtcttggataccagcccattggagggagatagcctgacctctgtccttgctccttctccctgcagcctacgggtctgttttctgtgtgtgcccatttccttgacagctttattctttgtgaaagtggtataatttattgttaaatatttgaacaataaaaaaggtacaaaaagtgaagtacaaattacccaaatctctccacccttatataatcattgtcaaccctttgatgagtgatatttccctatacctatgtacccagatagatatatgcatagataaaagtgatgaaatataagtgctgttctatctgtattttttcaccaaacaatatatgttgtgagcttctatgtcaataaatatatatatcagcaaaaaaaaaaaa

SEQ ID NO: 71 - DNA, 1693 bp, Homo sapiens
  CDS (30)..(1643)
aaaggccctccgaggctacggtggttgggatggcgtacctgagcgagtgtcgcctgcgactggagaaaggctttatcttggacggggtggctgtgagcaccgctgcccgcgcttatgggcgctctaggcccaagctgtggtcggcgattccgccctacaacgcgcaggaggactaccacgcccgcagctacttccagagtcacgtggttccgccccttttgcggaaaactgatcagagtctcaggacacttgtggattgcgtgttcagcatggggaatgcaagtgactacgcctggttggcatcccataccacacccaggggaatggggaagccaagagggcattctctccagcaggtgactgggcatgaccactacaatgctgatctgaaaccgatcgatgggttcaatggaagagagtctgggacatcaggcaacgtggcgacccgaagcagccaaaatgagacctcgacagcaaaggcctcgacagcggagcccggacctttgcaaaatctgcaagtaacgccaacgtcacaaagcgcgaccgagccctgtacgtcatcgttccgcgacgccgacgcgatgtgtgagagattattggaagaaaaccttgccattgttgaagacatcttgccctcacacgcctgccttgggtatggaaggaatctgaagaagagctggcacccgcagaccctcaggaatgtggagaaagtgtggaaggccgagcagaagcatgaggctgagcggaagaagattgaggagcttcagcgggagctgcgagaagagagagcccgggaagagatgcagcgctatgcggaggatgttggggccgtcaagaaaaaagaagaaaagttggactggatgtaccagggtcctggtgggatggtgaaccgtgacgagtacctgctggggcgccccattgacaaatatgtttttgagaagatggaggagaaggaggcaggctgctcttctgaaacaggacttctcccaggctctatctttgccccatcaggtgccaattcccttcttgacatggccagcaagatccgggaggacccactcttcatcatcaggaagaaggaggaggagaaaaaacgagaggtattaaataatccagtgaaaatgaagaaaatcaaagaattgttgcaaatgagtctggaaaaaaaggagaagaagaaaaagaaggagaagaaaaagaagcacaagaaacataagcacagaagctcgagtagtgatcgttccagcagcgaggatgagcacagtgcagggaggcacaactctaaggtgaacaggagagagacaggccaaactaggagcccatcacctaaaaaagaggtctaccaaaggcgacatgctcccggatacaccagaaaactctctgcagaggaattagagcgaaaacggcaagagatgatggaaaacgccaaatggagggaggaggagagactgaacatcctcaagaggcatgctaaggatgaggaacgggagcagaggctagagaagctggactcccgggatgggaagttcatccaccgcatgaagctggagagtgcatctacttcctccctggaggatcgggtgaagcggaatatctactctttacagagaacttcggtagctctggagaagaactttatgaaaagatgaaaactgtcccctctcttattggttttcctgcattttccagggaagct

SEQ ID NO: 72 - DNA, 2266 bp, Homo sapiens
  CDS (30)..(1271)
aaaggccctccgaggctacggtggttgggatggcgtacctgagcgagtgtcgcctgcgactggagaaaggctttatcttggacggggtggctgtgagcaccgctgcccgcgcttatgggcgctctaggcccaagctgtggtcggcgattccgccctacaacgcgcaggaggactaccacgcccgcagctacttccagagtcacgtggttccgccccttttgcggaaaactgatcagagtctcaggacacttgtggattgcgtgttcagcatggggaatgcaagtgactacgcctggttggcatcccataccacacccaggggaatggggaagccaagagggcattctctccagcaggtgactgggcatgaccactacaatgctgatctgaaaccgatcgatgggttcaatggaagagagtctgggacatcaggcaacgtggcgacccgaagcagccaaaatgagacctcgacagcaaaggcctcgacagcggagcccggacctttgcaaaatctgcaagtaacgccaacgtcacaaagcgcgaccgagccctgtacgtcatcgttccgcgacgccgacgcgatgtgtgagagattattggaagaaaaccttgccattgttgaagacatcttgccctcacacgcctgccttgggtatggaaggaatctgaagaagagctggcacccgcagaccctcaggaatgtggagaaagtgtggaaggccgagcagaagcatgaggctgagcggaagaagattgaggagcttcagcgggagctgcgagaagagagagcccgggaagagatgcagcgctatgcggaggatgttggggccgtcaagaaaaaagaagaaaagttggactggatgtaccagggtcctggtgggatggtgaaccgtgacgagtacctgctggggcgccccattgacaaatatgtttttgagaagatggaggagaaggaggcaggctgctcttctgaaacaggacttctcccaggctctatctttgccccatcaggtgccaattcccttcttgacatggccagcaagatccgggaggacccactcttcatcatcaggaagaaggaggaggagaaaaaacgagaggtattaaataatccagtgaaaatgaagaaaatcaaagaattgttgcaaatgagtctggaaaaaaaggagaagaagaaaaagaaggagaagaaaaagaagcacaagaaacataagcacagaagctcgagtagtgatcgttccagcagcgaggatgagcacagtgcacaactctaaggtgaacaggagagagacaggccaaactaggagcccatcacctaaaaaagaggtctaccaaaggcgacatgctcccggatacaccagaaaactctctgcagaggaattagagcgaaaacggcaagagatgatggaaaacgccaaatggagggaggaggagagactgaacatcctcaagaggcatgctaaggatgaggaacgggagcagaggctagagaagctggactcccgggatgggaagttcatccaccgcatgaagctggagagtgcatctacttcctccctggaggatcgggtgaagcggaatatctactctttacagagaacttcggtagctctggagaagaactttatgaaaagatgaaaactgtcccctctcttattggttttcctgcattttccagggaagctgctgaccccttaattctctttataagagttcaaatgacttctttcacagatgtcaaaccaccagtgttcaaagtgaccctgcttcattgagtcctgaaacagctcacttcctttgagagctagtgtgacttgctttgtgggacactcagtaactttgggttttgactctttaacgggtgggcactggaccatctcggtgggagtgcttgtgccactctggaaggctgttccctggggttgtgatgtttatcatgccacttccttcttacctgtgccaacagacctatttcactgcctcagcgtacaccagacccttcagaaacctctctggtgtcacccagatagattgtgcttactgagacaaatgaacgtttacttgatttagaagataatgtgacagaatgatgtcaggttaggtcaaagccaagggagtgacagaatctggaaaatcaaacaatacaaaaagccctaaatgaactgttaactatttgatctttggatgtaaaattgtaatgcgtatatgtacaaatgtacaatttttacatgcttttaaaaaaggttagctttgtgaaaaaaaaaaa

SEQ ID NO: 73 - DNA, 2125 bp, Homo sapiens
  CDS (334)..(1980)
gcacgaggtgtcattcctgactgaggctgttgtatctgtcaaaagagaggagaggtagggggcattctgaaaaatgatcactcatggcttgcaggagcaagagccagacaggactttgcaactggcagctttctgagtgcataagacctccacctctagactagctcttcagtcatggttagccccttcagtccattatcctccaatacaatgcccatgccttctggggctttcagctaagttttgtttaaaaaatgtgggttttttttttgccaattcattaaggcttttccctttgttttctcctgctggtggttcagagttaaattcagtatgaataagagagggaaatatacaacactgaatttggaggagaaaatgaaggttctaagtagaattgaagctggacgatcacttaaaagtgtaatggatgaatttggaatcagtaagtcaacattttatgacattaaaaaaaataagaagttaattctggactttgtactgaagcaggacatgccattagtaggggctgagaagagaaagaggacaacgggagccaaatatggtgatgtagatgatgcggtctacatgtggtaccaacagaaacgctcagccggtgttccggtaagaggcgtggagcttcaggctgctgcagagagatttgcacggtgttttgggcgaacagatttcaaagctagcactggttggctttttagatttcgaaatcggcatgcaattgggaaccgaaaaggatgtggggaacaagtcctaagttcagtttctgaaaatgttgagccatttcgacaaaaactgtccatgataatcaaagaggagaaactgtgtctagctcagctatacagtggggatgaaacagacctcttttggaagtcaatgccagaaaattctcaggcaagtaggaaagatatctgcctaccagggaagaaaataaacaaagaaaggttgtctgcctttttatgtgcaaatgcagacggaactcataaattaaagtcaatcattattggaaaatcaaaactgcccaaaagtgtgaaagaggacacaagtacattgcctgtgatatataaacccagtaaagatgtttggttcaccagagaattgttttcagaatggttttttcaaaactttgttcctgaggtccgacattttcaacttaatgttctaagatttcatgacgaggacgtcagggcattgttacttctggacagttgcccggctcatccttcctctgaatccctaaccagtgaggatggtcgaataaaatgtatgttcttcccccataacacttcaaccttgattcaaccaatgaatcaaggtgtgatcttgagctgcaaacggctgtatagatggaagcaacttgaagagagtcttgtaatatttgaagaaagtgatgatgagcaagagaaaggagataaaggagtttccaaaattaaaatctacaatataaaaagtgcaatttttaactgggcaaaaagttgggaagaagtaaaacaaataaccatagcaaatgcatgggaaaatcttctttacaaaaaggaacctgaatatgattttcaaggcttagaacatggggattatagagaaattcttgaaaaatgtggggagttggaaactaagttggatgatgatagggtgtggttaaatggagatgaagaaaagggttgtctcctaaaaaccaaaggtggaataacaaaggaagttgttcaaaaaggaggagaagctgagaagcagactgctgaatttaaattatctgctgtaagagagagtttggactaccttcttgactttgttgatgccacacctgagtttcagagattccacttcacactgaaagagatgcaacaagaaatagtcaagaaacagttccagagtaaaatccattctagaattggtagctttttgaaacctaggcctcataatattaaggactccttcagtgggccttcaacttctggttctaatcattagattttgtgtttaaagatttctgccattatatgatgtaggccagctgtgaattgtcttgttttagcaactgacattattttgtatatcagtgcccatttatataatggttataaaatttacagtttgaaaataaaaaaaaaaa

SEQ ID NO: 74 - DNA, 2214 bp, Homo sapiens
  CDS (1)..(897)
atgggccatgtgagtagtgacgatgggcacagtgatgaggatgagctgaggaaatccctgtctgagctggtggatgacaagttcgggacaggcacgaagaaggtgacgcgaatcctggatggtggcaaccccttcctggatgtcccacaggcgctcagtgccaccacctacaagcacggcgtcctgacccggaagactcacgctgacatggatggcaagaggacgccccgtgggaggcgtggctggaagaaattctacgcagtgctcaaagggaccatcctgtacctgcagaaggtgagagactgccccagagaccttactcacccaggggcctctgactacagcaagaagtccaacgtgctgaagcttaagacagccgactggagggtattcctcttccaggcaccgagcaaggaagaaatgctgtcctggatcctcaggatcaacctggtggcagccattttctctgccccggccttcccagccgctgtcagctccatgaagaagttctgtcggcccctgctgccctcctgcaccacccgcctctgccaggaggagcaactgcggtctcatgagaataagttgaggcagctgactgcggagctggccgaacacaggtgtcacccagtcgagaggggcatcaagtccaaggaggccgaggagtaccggttgaaggagcactatctcaccttcgagaaaagccgttatgagacctatatccacctcctggctatgaaaatcaaagtgggctcagatgatctggagcggattgaggcccggctggccactctggaaggggatgacccttctctccggaagacacattcaagccctgccctcagccagggccatgtgactggcagcaaaaccacaaaggatgccactgggcctgatacttagctgacatggatttgcagaccccagggtgggcagatgtctccagtggggtcagtgagcacaattccagccaggggccacttggaccaagctccagtcagttgatgggcagctagaggggtgcagaaagcctgtgggcccaggagatggagatgccgtttgtggcgttgatctccttgcgtccttgggcatctccgggcatcagaccctctccctggcccttgttttcctctccaccatggagcctcattttgtaggccagttgtgtgcatgctctagacaccacctcgctggagaagctggaagggctgttgtcttcccaggtctttctcttctcatcaagctcctctcctcatcttttttgtgtgtgagggcaggtcttgactctaggtctcagctggaaccccaccctttctcctcctccttcctctgagttgaccagcagcaggtctgccgaccaccagcaccatcctctcctcccagcagcctccagaaccatgcccaggtctcctgcctcacatcacaataatctgggacccaggcttgtgccctttcagtgtaaagctgactccatcacatgtgcatccacttcttttcatccattgagatcacactgcctcctttttatacagacacaaatatacatctataagaataatatatacataaggaacccctgaaagatggttttggaactggaatcagttagaggatgaaatcagataaaggaaaagcctattttggagcttcccctgttaggaaggatggctgcacctggccccctggcattcctgacgctctaggagggaagggggaggcagtgctggcctcccttgccctgtttttccctcttccagctgacctgtgacttatactgctcttaccgatgatacttttggaaaaaatagagcgtgtatgcaccgccccgtttgtcccatggatatcctggggtgtgagtcggatgggaccacggccctgtttatatttgggtctttatgttggtgctgccaggtctctgagctccagaggtggcctcttggacagatctactgctataggaataaaagacactctgtctcgcaaatggccgcttgtcaacaagcccaaagatgcttgtcggaggacggttatggaagcccttaattcttggttgtgggaaaaggtggaatgacaagttattgattgtttttctgtcgctatttctttcatttgtctagtgaatcagaaaggcttagcaaggccacatctgggaagagtggagaaatttgccacttgacgatcacggattagctagcacctttaagccctgcatttctc

SEQ ID NO: 75 - DNA, 979 bp, Homo sapiens
  CDS (295)..(933)
agatagtgcggcggcccaagcgtcgcgtctacccgggggattacagtaacccggctgtcagtgatgagtcagagtgcgtggtgctgatgctgctgccatttcatcacctttgcgagcgcagcatccatccctccgctctcccggcgcctgggcctacccagcttcgggctcccaggccagcgatgcgctcgcggctgagctagatcctgccgagccgcgctctctgaggcgtcggcggggcgccccctcccgccgtccccggtccgggccaaggagacctgcagagccgcggccatggaggccatctggctgtaccagttccggctcattgtcatcggggattccacagtgggcaagtcctgcctgatccgccgcttcaccgagggtcgctttgcccaggtttctgaccccaccgtgggggtggattttttctcccgcttggtggagatcgagccaggaaaacgcatcaagctccagatctgggataccgcgggtcaagagaggttcagatccatcactcgcgcctactacaggaactcagtaggtggtcttctcttatttgacattaccaaccgcaggtccttccagaatgtccatgagtggttagaagagaccaaagtacacgttcagccctaccaaattgtatttgttctggtgggtcacaagtgtgacctggatacacagaggcaagtgactcgccacgaggccgagaaactggctgctgcatacggcatgaagtacattgaaacgtcagcccgagatgccattaatgtggagaaagccttcacagacctgacaagagacatatatgagctggttaaaaggggggagattacaatccaggagggctgggaaggggtgaagagtggatttgtaccaaatgtggttcactcttcagaagaggttgtcaaatcagagaggagatgtttgtgctagtcagttcttttatttccaaaacatgctctcctacttgaactga

SEQ ID NO: 76 - DNA, 1884 bp, Homo sapiens
  CDS (199)..(624)
aaggatccttaattaaattaatcccccctccccgagtggaagccgccgccgcgctcgcagctcgcaggcgccgcgtagccgtcgccaccgccgccagcccgtgcgccctcggcgcgtacccgccgcgctcccatccccgccgccggccaggggcgcgctcggccgccccggacagtgtcccgctgcggctccgcggcgatggccaccaagatcgacaaagaggcttgccgggcggcgtacaacctggtgcgcgacgacggctcggccgtcatctgggtgacttttaaatatgacggctccaccatcgtccccggcgagcagggagcggagtaccagcacttcatccagcagtgcacagatgacgtccggttgtttgccttcgtgcgcttcaccaccggggatgccatgagcaagaggtccaagtttgccctcatcacgtggatcggtgagaacgtcagcgggctgcagcgcgccaaaaccgggacggacaagaccctggtgaaggaggtcgtacagaatttcgctaaggagtttgtgatcagtgatcggaaggagctggaggaagatttcatcaagagcgagctgaagaaggcggggggagccaattacgacgcccagacggagtaaccccagcccccgccacaccaccccttgccaaagtcatctgcctgctccccgggggagaggaccgccggcctcagctactagcccaccagcccaccagggagaagagaagccatgagaggcagcgcccgccaccctgtgtccacagcccccaccttcccgcttcccttagaaccctgccgtgtcctatctcatgacgctcatggaacctctttctttgatcttctttttcttttctccccctcttttttgttctaaagaaaagtcattttgatgcaaggtcctgcctgccatcagatccgaggtgcctcctgcagtgaccccttttcctggcatttctcttccacgcgacgaggtctgcctagtgagatctgcatgacctcacgttgctttccagagcccgggcctattttgccatctcagttttcctggaccctgcttcctgtgtaccactgaggggcagctgggccaggagctgtgcccggtgcctgcagccttcataagcacacacgtccattccctactaaggcccagacctcctggtatctgccccgggctccctcatcccacctccatccggagttgcctaagatgcatgtccagcataggcaggattgctcggtggtgagaaggttaggtccggctcagactgaataagaagagataaaatttgccttaaaacttacctggcagtggctttgctgcacggtctgaaaccacctgttcccaccctcttgaccgaaatttccttgtgacacagagaagggcaaaggtctgagcccagagttgacggagggagtatttcagggttcacttcaggggctcccaaagcgacaagatcgttagggagagaggcccagggtggggactgggaatttaaggagagctgggaacggatcccttaggttcaggaagcttctgtgcaagctgcgaggatggcttgggccgaagggttgctctgcccgccgcgctagctgtgagctgagcaaagccctgggctcacagcaccccaaaagcctgtggcttcagtcctgcgtctgcaccacacaatcaaaaggatcgttttgttttgtttttaaagaaaggtgagattggcttggttcttcatgagcacatttgatatagctctttttctgtttttccttgctcatttcgttttggggaagaaatctgtactgtattgggattgtaaagaacatctctgcactcagacagtttacagaaataaatgttttttttgtttttcagaaaaaaaaaaaa

SEQ ID NO: 77 - DNA, 2233 bp, Homo sapiens
  CDS (48)..(1373)
ctttgtaaccccgttccggccaagccgcttcagcgggggacgtagccatgaaggaagagaaggagcacaggcctaaggagaagcgagtaaccctgttaacccccgccggggccacaggcagcggtggtgggacctcgggggacagctccaagggggaagataagcaggatcgcaacaaggagaagaaagaagcgctgagcaaggtgcccggtcggccgctggcccgggagagggcgggacgagtccgcagcgcggggaggatggctgggaatggggctgccccctttctttctcaggttctccttctatctcttcgcctgaatggaagtcgcatcatcctggttcatccattcacccgaaatggggagagcccctcccggccaaatcctgggtggggtttgtatcctcatatgtatgccagagcatacatcaactttaaaaaccaagaggacattattttgttcagggatcgctttgatggttatgtattccttgacaataaagctaaaaagacaaccccacttttgagcttcctgaaaaacaagcagagaatgagagaagaaaagagagaagaaaggaggaggagagaaatagaaagaaaaagacaaagagaagaagagaggaggaaatggaaagaagaagagaaacgaaaaaggaaagatatagaaaagctaaagaagatagacagaattccagaaagggacaaattaaaggatgaaccaaagattaaggtacacaggtttctgttacaagctgtgaatcagaaaaatctgctcaagaagccagaaaaaggagatgaaaaagaattggacaaaagagaaaaagccaagaaattggacaaagagaatctcagtgatgaaagagccagtgggcaaagttgtacattgcccaagcgttctgatagcgaacttaaagatgaaaaaccaaagagacctgaagatgagagcggcagagactatagggagagggaacgggaatatgaacgagatcaggagcgcatacttcgagaaagagagaggctgaagcggcaagaagaagagcgccgtaggcagaaggagcgctatgagaaagagaagacttttaagagaaaagaagaagaaatgaaaaaagagaaagacacacttcgggataaaggaaagaaggctgaaagtacagaatcaataggcagctcagaaaaaactgaaaagaaagaagaagtggtcaagagagatcgaataagaaacaaggatcgtccagcgatgcagctttaccaaccaggagctcgaagccgaaatcgactctgtccccctgatgacagcaccaagtctggagattcagcagcagaaaggaagcaggaaagtggtattagccatagaaaagaaggaggagaggagtgataagtccagatggccttaggtgtcctgactgtctaggcagccaaagagcacacgttaagcaatccagaggtgccttcagggcaaagaatagagagaaagggagccgctgtgctggtggggtacactgcagaggagtaagtcttgtgtcaaagcaggaatctgatcagaggttcagaattggaagtacaatttcattgcttttgcaatttctacaaattaattttaaagtgtcagaaaaaggtgacggcaaggacatgcattgcaatttgcagggggaattgtcaagtgaggacttcatcacatatgacacgagagaaaagtaagagctggttctaaaatcaaaagctgttgttcatcctgaattgaattttctgaatttgggtggagcagagtcgctttgaagccttgttccgatctaattctattgtattgttgatgataagtgttgacattgggtagtgtagaagcaacaagcatgtccttgtagtacaggtacagtgaaggatagaacacactttcgttgatacaaaaatttaaatagttatgttacttctgtatccagtgtcctaaagttttaggattagttttagttttttgtttgcttatatgagcttagcgtaaagaatatttttaaacttcgtgttttgtcatcagcatcttttctattaagaggtaaaatgtagtccttgtttgactcttgacaatccagtgtgtttgatcttaggtctcatgatctgagtgcataccctctccaggaaggaaactgcaccagtgtctattcctgttaaatagcaacttttagtctcagcttgtttcgttttgatgtcaataaatagtaacagcataaaaaaaaaaaa

SEQ ID NO: 78 - DNA, 1353 bp, Homo sapiens
  CDS (28)..(855)
aaatgttttgtatatagtaatggactcatggatcatctatgtgtctgtgaagagggaggcaacaaactatggtataagaagccaggaaatttccagggaacattggatgcattttttaaaatcattcgaaatgagggcattaaatctctatggagtggccttcctcctaccctagtgatggcagttcctgccacagttatttattttacctgctatgatcaattaagtgctcttctgagatctaagttaggagaaaatgaaacctgcataccaattgttgctggaattgtagccagatttggtgcagtaactgtgataagtccactagaattgattagaaccaagatgcagtccaagaagttttcttacgtggaactgcatcgatttgtcagcaagaaagtatctgaagatggttggatttccctttggaggggctgggctcctactgttcttagagatgtacctttctcagcaatgtactggtataactatgaaattttaaagaagtggttatgtgagaaatctggtttatatgagccaacatttatgatcaactttacttcaggggcattgtctggttcttttgctgctgttgcaactttaccatttgatgtagtaaaaacacaaaagcagacacaactttggacatatgaaagtcataaaatttctatgcctttgcatatgtcaacctggattataatgaagaacattgttgctaaaaatggattttccggattattttcaggcctaattcctcgcttaattaaaattgctcctgcttgtgccattatgatcagtacatatgaatttggaaaggcttttttccagaaacaaaatgttcgaaggcagcaatactagtgatgctgtttcaacttgaaacaacaactatagccaaagaagatggagactcttaggcaagaatgtttttcaccattattctctcacaatgattttatgtctttctttcctataatttaaataaataatttcagctctacctctaaatcataattttaaaataaattttatcttatttttggtgatattgaaaaagatattctagaaatcaccaccattgagcattcttgtaaaaatagattactccttagcatcaaaagcagtctcttgaaagtttaatattatatgtttcagtgtaacataatcttactgggagtgtgttgaatacaccagaactttttgaattgtgtgctgaatgatgtacatagtctagaagaaaaaagcccaagtcttgtgcacatttaaatcgtgtacataagtatttccgtatttcagtaaagtagataaagcactcgttaaatagcattgtttacatcgaccaaaaaaaaaaaaaaa

SEQ ID NO: 79 - DNA, 3908 bp, Homo sapiens
  CDS (48)..(2972)
ggaatctctgcacgggccttggaaaacgactgtcttcttctgccaaaatgtcaggaattggaaataaaagagcagctggagaacctgtcacctccatgcctcctgagaagaaggcagctgttgaagattcagggaccacagtggaaacaattaagctaggaggtgtctcttcaacggaggaactagacattagaacactgcaaaccaaaaatcgcaagctggcagaaatgttggatcagcggcaggccattgaagatgaacttcgtgagcacattgaaaaactggaacgacgacaggccactgatgatgcctcactattgattgtcaaccgatactggagtcagtttgatgaaaacatccgtatcatccttaaacgttatgatctggagcagggcttgggagacctactcacagaacgaaaagcccttgttgtgcctgaaccagaaccagactctgatagcaatcaggagcgtaaagatgaccgagagagaggggaagggcaagagccagctttctctttccttgctactttggccagcagttccagtgaagagatggagtctcagctgcaggaacgtgtggagtcttcccgccgagccgtgtcccagattgtgactgtttatgataaattgcaagaaaaagtggagctcttatcccggaagctaaacagtggagataatctgatagtggaggaagcagtgcaggagctgaactctttcctcgcacaggagaatatgaggctacaggaattgacagatcttcttcaggaaaagcatcgcaccatgtctcaggagttctccaagttgcagagtaaagtggagacagccgaatcacgagtgtctgtcctggagtccatgattgatgacctgcagtgggatattgacaaaattcgaaagagggaacagcgactcaaccgacacttagcagaagtcctagaacgggtgaattccaaaggttataaggtgtatggagcggggagcagtctgtatggcggcacaatcactatcaatgctcggaagtttgaggaaatgaatgcagagcttgaggagaacaaagagttggctcagaaccgtctctgtgagctggagaaacttcggcaagactttgaggaggtcactacacaaaatgaaaagctgaaggtggaattgcggagtgcagtggagcaagtcgttaaggaaactccagaatatcgctgcatgcagtcacagttctccgtcttgtataatgagagcctacagttgaaagcacacttggatgaggctcggaccctgcttcatggcaccagaggaacccaccagcaccaggttgagcttattgagcgagatgaggttagtcttcataagaagctgaggactgaagtaattcagctagaagatacattggcccaggtccgcaaggagtatgaaatgctgaggatagaatttgagcagacccttgctgccaatgaacaagcaggccctataaacagggagatgcgccacctcatcagtagcctccagaatcacaatcaccagctgaaaggggaggtcctgagatataagcggaaattgagagaagcccagtctgacctgaacaagacacgcctgcgtagtggtagtgccctcctgcagtcccagtctagtactgaggacccgaaggatgagcctgcggagctaaaaccagattctgaggacttatcctcccagtcctcagcttcaaaggcatctcaggaggatgccaatgaaatcaagtctaaacgggatgaagaagaacgagaacgagaaaggagggagaaggagagggaacgagaaagagaacgggagaaggagaaggagagagaacgagagaagcagaagctaaaagagtcagaaaaagagagagattctgctaaggataaagagaaaggcaaacatgatgatggacggaaaaaggaagcagaaattatcaaacaattgaagattgaactcaagaaggcacaggagagccaaaaggagatgaaactattgctggatatgtaccgttctgccccaaaggaacagagagacaaagttcagctgatggcagctgagaagaagtctaaggcagagttggaagatctaaggcaaagactcaaggatctggaagataaagagaagaaagagaacaagaaaatggctgatgaggatgccttgaggaagatccgggcagtggaggagcagatagaatacctacagaagaagctagccatggccaagcaggaagaagaagcactcctctctgaaatggatgtcacaggccaggcctttgaagacatgcaggagcaaaatatccgtttgatgcagcaattgcgggagaaggatgatgcaaatttcaagctcatgtcagagcgtatcaagtccaatcagatccataagttgcttaaagaagagaaggaggagctggcagaccaggtgttgactctgaagactcaggttgatgcccagctacaggtagtaaggaaactggaagagaaggagcatctgttacagagcaacattggcacaggggagaaagagctgggtcttaggacccaagccttagagatgaataaacgcaaggcaatggaggcagcccagcttgcagatgacctcaaagcacaactggagttggctcagaagaagctacatgattttcaggatgagatcgtggagaacagtgttaccaaagaaaaggacatgttcaatttcaaacgagcccaggaggacatctctagacttcgcaggaagctggagaccacaaagaaaccagacaatgtacccaagtgtgatgagattctgatggaagagattaaggattacaaggcacgcttgacctgtccgtgctgtaacatgcgtaaaaaggatgctgttcttactaagtgttttcatgtcttctgctttgagtgtgtgaagacacgctatgacacccgccagcgcaaatgtcccaagtgtaatgctgcttttggtgccaatgattttcatcgcatctacattggttgatctaagtcaagagaagaagaggagctggctagtcaggaacttattcattaaccaccaaacctctacctcttctctccttgactgtcacctgtaggacagtttatcagtcaactacctttcctccagactttacttccaggctctcctcttcagtagctggatgactttagcagaaaggactggtaaatacaagccttgggtttcagaatgaattagaaacaaataactcttactgtcttccctcccagctttgtttattttgtgcttttagacttttcagtgttttctttttccagcccactgtataaacttggattgtccattcctcctgaagaaatcaagttggtatttttgatgtggaaaagggaacaaaagtggaaacatggctacttttggggagtgatattttaaaaaataagttgtctatgggcacaaagttttcttcatttgtgtagcaaacttcttgtgaatgtggattacaaaatggtataattgtgctactctcccctgggtggtttgcagccctaatgaaattatgtctaggatgattcagtctatttcccatttactagcagagtaacttgttaagatcagctggctttcttgttaaagttatttaagttttgaatgctctactacttcaagtctttaaatttcttgagactagaataattttaaataatatgaccctttgtcttctaatgaaataaagattgaagaggttgagtcaggactgagctggtgaagaaatcttgtgggtattctggaaatttgatacggagagaacttggtgagctatgaattactctcagtctcctttttacagggttgttgtgatccctcttttccagaaaattctgtggaatgtttctgtaggactttgttctccacaagcttgaattaaagcaggattcagtttgcaaaaaaaaaaaa

SEQ ID NO: 80 - DNA, 1702 bp, Homo sapiens
  CDS (347)..(619)
cctgttcacggattttcaagcaagtttctagagcatgtgtacgtccttcccattcagattttttatgagccaccattatgtcaatctgtttcatgagctcctgtagttctgcttcacaagatgtcaaaaatcccccaccatgccctcgattttgtattccttctaacaaagcctccatcaccaaatcccctttgttttggcaaccacatccgggaatccgaggaaagcgagtgcagacacgtgatgcgggggagggcggggcgtggcaggagcaagcgtctgccgcggtggccgggtgccggtaagggtttccagcgcccccggcctaggttttggaggcgcgggaatgcgttcgttgctcagtgtcggacttccccctattcccatcggccgaggctgtcactttacgctcataaccgtttttctttactgcactcgtgtcgggaggaaagggacttgcgtggcacccccagacctccccgtctccgcttccacgtttggtacatcctgcctgaggcaggaagccgcagctgagggacggcctgtcgtacgatttgacaagatcaaagctgcaggaaaatggacagtgaggttcagagaggtggaaggatcttggatttgattgatgatgcttggcgagaagacaagctgccttatgaggatgtcgcaataccactgaatgagcttcctgaacctgaacaagacaatggtggcaccacagaatctgtcaaagaacaagaaatgaagtggacagacttagccttacagtacctccatgggaatgttccccccattggaaactgacgcttggctcctttcttgtggatggattttctcaaagtacacagataaagcatggtttgtttcagtctccaaattcaaacctttgagtaataaatcagcactcaaaaatgtacacccatttagtttgtggtagcaaagtgcaatgccgaaattgaatgagaaactgagatttctcagtaatggtgaatatttcgctctttaaacctaaaactcttcattgagtagcttatatttgaacatgattggttaaacatttgcctctacctctgattttgctttgctgtcaaagtttaacaccttccaactacttatgtgtgtcctgtaacacaggtgattgaacgtatgagagggaaaggcaaagaaaaaggaagccagacactaggagaattattaacttctcatacttccccacattgagaagcattcggagtgtatttagcctgtagatgttgtgatatgcaaatatcccattccctggttactggcattcctaagattcttcatggtattttcaaactttggataaatttacagattagaaagatatctgacagttaatctctgttctccttacaaattccttttgtgctgctggaaaggatctttggctaggtggatgactagttttattcaaagccttttctcaaagccctttcagttacaaccaccccactatggaatcagtatttagttatacatttgtataagaacctgtattttgaaaaacacattcatgtatatttattcctggaattatttgcctgttaaacagtgtctttcatgttctctccccagattgtaaactctgtaagaagctgcttgtatctgtatcccttgttgaaactctgaaaacactgaataactaaaatctcttctcatccttttaaaaaaaaaaaaa

SEQ ID NO: 81 - DNA, 670 bp, Homo sapiens
  CDS (48)..(449)
cttgcgcggagaactcagcgctgagattgtctaaagccccaggaaaaatggtggaaaattcaccgtcgccattgccagaaagagcgatttatggctttgttcttttcttaagctcccaatttggcttcatactttacctcgtgtgggcctttattcctgaatcttggctaaactctttaggtttaacctattggcctcaaaaatattgggcagttgcattacctgtctacctccttattgctatagtaattggctacgtgctcttgtttgggattaacatgatgagtacctctccactcgactccatccatacaatcacagataactatgcaaaaaatcaacagcagaagaaataccaagaggaggccattccagccttaagagatatttctattagtgaagtaaaccaaatgttctttcttgcagccaaagaactttacaccaaaaactgaactgtgtgtaaccatagtaacaccaagcacgtatttatttataagtttttgccattataattttgaccataaattaatttgaccatctctcttattaatagagaagtaaaaaatgtaacttgaccttctcttagattatgttcaatgaatattgtaaatgttcaagtattgttaatgaatagaataaatacaatattgcattcccataaaaaaaaaaa

SEQ ID NO: 82 - DNA, 1584 bp, Homo sapiens
  CDS (176)..(1534)
ggcagttcctcccggtgtcggaggccgattcgccgtgtggcgggttcgggtcccgcctcctgactctggcctctagtccctgagtcccgggcgggctgcattcgtcggggaaacctctcctcgaccaggggcacctctactcgaccaggggcgacggcgtactttgggcttcatcatggaggactacctgcagggttgtcgagctgctctgcaggagtcccgacctctacatgttgtgctgggaaatgaagcctgtgatttggactccacagtgtctgctcttgccctggctttttacctagcaaagacaactgaggctgaggaagtctttgtgccagttttaaatataaaacgttctgaactacctctgcgaggtgacattgtcttctttcttcagaaggttcatattccagagagtatcttgatttttcgggatgagattgacctccatgcattataccaggctggccaactcaccctcatccttgtcgaccatcatatcttatccaaaagtgacacagccctagaggaggcagtagcagaggtgctagaccatcgacccatcgagccgaaacactgccctccctgccatgtttcagttgagctggtggggtcctgtgctaccctggtgaccgagagaatcctgcagggggcaccagagatcttggacaggcaaactgcagcccttctgcatggaaccatcatcctggactgtgtcaacatggaccttaaaattggaaaggcaaccccaaaggacagcaaatatgtggagaaactagaggcccttttcccagacctacccaagagaaatgatatatttgattccctacaaaaggcaaagtttgatgtatcaggactgaccactgagcagatgctgagaaaagaccagaagactatctatagacaaggcgtcaaggtggccattagtgcaatatatatggatttggaggcctttctgcagaggtctaacctccttgcagatctccatgctttctgccaggctcacagctatgatgtcctggttgccatgactatctttttcaacactcacaatgagccagtgcggcagttggctattttctgtccccatgtggcactccaaacaacgatctgtgaagtcctggaacgctcccactctccacccctgaagctgacccctgcctcaagtacccaccctaacctccatgcctatcttcaaggcaacacccaggtctctcgaaagaaacttctgcccctgctccaggaagccctgtcagcatattttgactccatgaagatcccttcaggacagcctgagacagcagatgtgtccagggagcaagtggacaaggaattggacagggcaagtaactccctgatttctggactgagtcaagatgaggaggaccctccgctgcccccgacgcccatgaacagcttggtggatgagtgccctctagatcaggggctgcctaaactctctgctgaggccgtcttcgagaagtgcagtcagatctcactgtcacagtctaccacagcctccctgtccaagaagtgactgttgagaggcgaggaggtagtgggtgaggctacctgactcacttc

SEQ ID NO: 83 - DNA, 784 bp, Homo sapiens
  CDS (65)..(439)
gaaacgctatgtattagaggaagctgagcaactggagcctcgagttaatgctctggaagaggacatggatgatgtggagtccagtgaagaggaagaagaggaggatgagaagttggaaagagtgccatcacctgatcaccgccggagaagctaccgagacttggacaagccccgtcgctctcccacactgcgctacaggaggagtaggagccggtctcccagaaggcggagtcgatctcccaaaaggagaagcccctcccctcgccgagaaaggcatcggagcaagagtccaagacgtcaccgcagcaggtcccgagatcggcggcacagatcccgttccaagtccccaggtcatcaccgtagtcacagacacaggagccactcaaagtctcccgaaaggtctaagaagagccacaagaagagccggagagggaatgagtaatggactcagtttggttttagtccacatggcctcctgtggatataaggatatctgtatgtggaaggattaagatctcccccaggcagctataagaatattttagtttttttcttatcaagtttctcaacctttatttttaatgaaggaggtgctgagttttgtatctttttaatcataatcaacatcagtttttgacccaactaaccttgactgtattcaaacttatgagagtataaaggatctggaggttggggatatgactgacaaggaaaggctgtggccacctgatgaccctttccctttttattaaaccggacacacctgtttcccaaaaaaaaaaaa

SEQ ID NO: 84 - DNA, 1350 bp, Homo sapiens
  CDS (1)..(822)
atgccgagggcggagccaagagcgacactgggggagcaggaaaaggcggggcttccgcttggggcatggaggctgtacctcttacgtcacttccgtaaacaaacggagctgcggaggagcgggtcccgggatgtgaccggggctctgcttgtggctgcggcggtggcttctgaggctgtcgggtctttgcgggttgcggaagggggccccaatacccttcttcttcaggtcttaagaagctggccgtggtgcaataaggaacttaaaacaatggaagagcggaaagtgaagaggaggagtcctaagtcttttagtgcccactgtactcaggttgtcaatgccaaaaaaaatgccattccagtgagtaaaagcacagggttttcaaatcctgcatcacagtcaacttcacagcgaccaaagttaaaaagagtgatgaaagaaaagaccaaacctcagggtggagagggcaaaggcgctcagtcaactccgatccagcactccttcctcactgatgtctcagatgttcaggagatggagagagggctgctcagtcttttgaatgatttccactctggaaaacttcaagcatttggaaatgaatgttccattgaacagatggaacatgttcggggaatgcaggagaaattagctcgcttgaatttggagctctatggggagttagaggaacttcctgaggataagagaaaaacagccagtgactccaatctggataggcttctgtcagatttagaagaattgaattcttccatacaaaaactccatttggcagatgcacaagatgttccaaatacttctgctagctaaaatgaaatgtagtttgctttcttgtgatttgaagagaagcagcagtctttacttttccagccaaatccagtagcagaatcatcttccacaacaaggaattaaagtaattaaagtgcaagttcaatgatcgttttcacttactgcttttagtaaatgtgactcgctgtaattcgccataactggaggcctaggccttgttgaaggcttcatcaggaaatgtgacgcagagattgtgctgctgtgcttcatattgttgccttatgggattatacttgaaatgcattgtgctgatgttcttgacagggcggagggatttctctttcctgagctcaccaaacttattccagtgttgatcgcaagctgttgatgcacaggcgtcttgtggcaagcccagcttcagtttatgttagacaatcagtacacatgctggtgtgttttccaatggccagtgataagaaattaaataagtatttgtgagatttgctattttttaataaagtaattgttttaaattaaaaaaaaaaa

SEQ ID NO: 85 - DNA, 3109 bp, Homo sapiens
  CDS (610)..(1479)
ttctttgggttgactggatggatcctttgctccatggtggggattgctgggttcatcatgcagatgcactcaggagtgagtttggctgtgactgggatgtccaagatggcttcactcatgtgtctggtgcctcaggtgggttgtcttcgtgccagagcagaacatgccttgtagttactgccatattctagccaagttactccatttactgttcctttgttcgtttttcgtcgctttcccacgatcacacagatctcaggtccaggaggacgcatcgtctttttagtaacagtgcatgctgtgaggcttgtagagtcgcctctctcttcaggcgcagcagagggcggccgcaatagtacgctcgcgcggcggtggcgggtggtggtccttggaccacgcggtgggcggacagcggcacggcctcccctcccctccggacgcaagccgaagtacgtgagaggagacttccggccactgcgttgtagtcggcccggctgcaaagcgtttttctgcaggctgttttcccaggttccctcggcctgtacctcgcgcactcctcttgctccaggtccttcagtctccgctcgtctcaccgtaggctgtgacgacatgagcaacaaagaaggatcaggagggttcaggaaaaggaagcatgacaatttcccacataaccaaagaagagaagggaaggatgttaattcatcttcacccgtgatgttggcctttaaatcatttcagcaggaacttgatgcaaggcatgacaaatatgagagacttgtgaaacttagtcgggatataactgttgaaagtaaaaggacaatttttctcctccataggattacaagtgctcctgatatggaagatatattgactgaatcagaaattaaattggatggtgtcagacaaaagatattccaggtagcccaagagctatcaggggaagatatgcatcagttccatcgagccattactacaggactacaggaatatgtggaagctgtctcttttcaacacttcatcaaaacacgatcattaattagtatggatgaaattaataaacaattgatatttacgactgaagacaatgggaaagaaaataaaactccctcctctgatgcacaggataagcagtttggtacttggagactgagagtcacacctgtcgattaccttctgggagtggctgacttaactggagaattgatgcggatgtgtattaacagtgtggggaatggggacattgataccccctttgaagtgagccagtttttacgtcaggtttatgatgggttttcattcattggcaacactggaccttacgaggtttctaagaagctgtataccttgaaacaaagtttggccaaagtggagaatgcttgttatgccttgaaagtcagagggtcagaaattccaaaacatatgttggcagatgtgttttcagttaaaacagaaatgatagatcaagaagagggcatttcttagaatctaacgttactcagttactaattcttttgagaactcctaagagaccaatttgtaagacttatttagtatttcatttaactttattgtggcttttacatagaaacatattcagttgtacttgttttaaattgtatacaagctgtacataaaattagccaaatgaatcatttcttatatcttattcatgaaagtttgcatacagatgtttgcatatatgcctttttgaatttttgctggttaacctttatcatttatctttgtaatgtgaacatgcttcagagtgtaccttttgccataacctattttaatttactttttctgaagtttggagtgataatttttagtggaagcaatttgtaatttaagttggtagttatattatatatagaaaagattttttagttaaacttctggacatgagcgtcctgtttaaatttcttgttaatatcgtgccaagcctcaaaaataggcttattccatggaacaagaattaaaaatgaataagctatcaatatataatttaagtacaagtttaggctgggcgtggtggctcacgcctgtaatcccagcactttgggaggccgaggtaggcagatcacgaggtcaagagatcaagaccagcctgaccaacgtggcgaaacctcgtctctactagaaatacaaaaattagctggatatggtggtatgtgcctgtaatcccagctacttgggaggctgaggcaggagactcgcttgaacctgggaggcagaggttgcagtgagccgagattgcgccactgcactccagcctgggtaacagagcaagactccatctcaaaaaaaagaaagaaagaaaaaaagaaagtacaagtttataaagtattatagtgaaaaattcgcattctggctgattttaagccatttaaaatttatataaaacaaccttccataaaaatttgacaggtgcccagatgttgctttctccatttattttttgtttttttttaatcacagtaggtctgatagagaattggagctaaattataatatttttgttggtaaagttgagttatatacttgtacatacaatggaaatgcttttagtagtgattatttagcaatttttgtttttgttatattaggcatgtttggaggctttcctattctagcatttaaatttaaattttattaaaattaaataatttaaatctagcatttaaatttaaataatttaagtctagcatttacttttaaataattataatgaagttttgaaatactaagttaatccagacctttagttgtcccatggtgttaataaagttgccaaagaagatgtattatgaacaattcagcaataagacaattgtcaacacagttgagaataacaatggtaatcgttagtaatatttagaattggaatttgcctactgaaatagttatagatgattacttgtgatgtgaaactgaattgagcatgacaaccagacatttccagttggttttgtaagttttgagaatctagatactgggttttattttttgaaagattagctctgtttgtaagggctgattccttgaaaatgtaattttccagaaaaacacctaaagaaaataaaacatggacatgcctaaaaaaaaaaaa

SEQ ID NO: 86 - DNA, 890 bp, Homo sapiens
  CDS (208)..(831)
agttggctggttgcaccgatctgggggcttcccgggctcgggtaaccggagtgctggtatctaatcgtcgctcaaaagctcctaggtgcgcgggtggatataattcccggcttctcgagaagacactacagcctcaaggaggtatatcccgtgccttacctgactgggggctctgagtccagttgtgttgtcttcaacttagacaccatggaggcacctccagtcaccatgatgcctgtcactgggggcaccattaacatgatggagtacctgttgcagggaagtgttttagatcacagtttggaaagcctcatccaccgccttcgtggtttgtgtgacaacatggaacctgagactttccttgaccatgagatggtattcctccttaagggccagcaagccagcccatttgttctcagggcccgacgctctatggacagggcaggggcaccctggcatctgcgctacctgggacagccagaaatgggagacaagaaccgccatgccctggtgcgaaactgcgtggacattgccacatctgagaacctcaccgacttcttgatggaaatgggcttccgcatggaccatgagtttgttgctaagggacatttgttccgtaagggcatcatgaagattatggtgtacaagattttccgcatcctggtgccagggaacacagacagcactgaggccttgtcactctcctatctcgtggaattaagtgtggtagcacccgctgggcaggacatggtctctgatgacatgaagaacttcgcagaacagctaaaacctctggttcacctagagaaaatagaccccaagaggctcatgtgactaagaggatctgtccacatttggggcctatccttacttgtttgaaaaaaaaaaaa

SEQ ID NO: 87 - DNA, 1044 bp, Homo sapiens
  CDS (85)..(387)
ggaatacttccaagttgtagtgttgttgttttcagcctgctgctgctgctgctgttgcggctaggggaaccgtcgtggggaaggatggtgtgcgaaaaatgtgaaaagaaacttggtactgttatcactccagatacatggaaagatggtgctaggaataccacagaaagtggtggaagaaagctgaatgaaaataaagctttgacttcaaaaaaagcaagatttgatccatatggaaagaataagttctccacttgtagaatttgtaaaagttctgtgcaccaaccaggttctcattactgccagggctgtgcctacaaaaaaggcatctgtgcgatgtgtggaaaaaaggttttggataccaaaaactacaagcaaacatctgtctagatgtattgatggaatttctggctttctaaatgattttactttctgccttgaattttcaaggcatagatgtcaacttacagaataacatgttttaagataattaagtttaaaccagagaatttgattgttactcattttgctctcatgttctaaacagcaacagtgtaactagtcttttgttgtaaatggttattttccttataagaattttaagaactaagtggcaaattccatgaaaatatttctcagttctgtatgcacttttatttaacattattcatataattctccccccaccactttatttatagatactgcaaaagtgagaaggagataatagatactttgctctgaatttggcatccagagttaacatttctcccctcactcccttgctggtgtcatagttattagaatcagcagcctcttaactaattgcggtttcataggatatataaatgtttcaagccattattgctgaatggttctttagttattaacctagacccaaatcaaagaccagttggatttatgatattttttatttgttcttgcagccaaagtgccagtttctttaatatgtgaccaagaacacaaggagcatccatatggccaaataaatacactgaattttagaaaaacaaaaaaaaaaaa

SEQ ID NO: 88 - DNA, 1467 bp, Homo sapiens
  CDS (5)..(1165)
agccatggcgggaagcgagccgcgcagcggaacaaactcgccgccgccgcccttcagcgactggggccgcctggaggcggccatcctcagcggctggaagaccttctggcagtcagtgagcaaggagagggtggcgcgtacgacctcacgggaggaggtggatgaggcggccagcaccctgacgcggctgccgattgatgtacagctatatattttgtcctttctttcacctcatgatctgtgtcagttgggaagtacaaatcattattggaatgaaactgtaagagatccaattctgtggagatactttttgttgagggatcttccttcttggtcttctgttgactggaagtctcttccagatctagaaatcttaaaaaagcctatatctgaggtcactgatggtgcattttttgactacatggcagtctatagaatgtgctgtccatacacaagaagagcttcaaaatccagccgtcctatgtatggagctgtcacttcttttttacactccctgatcattcagaatgaaccacgatttgctatgtttggaccaggtttggaagaattgaatacctctttggtgttgagcttgatgtcttcagaggaactttgcccaacagctggtttgcctcagaggcagattgatggtattggatcaggagtcaattttcagttgaacaaccaacataaattcaacattctaatcttatattcaactaccagaaaggaaagagatagagcaagggaagagcatacaagtgcagttaacaagatgttcagtcgacacaatgaaggtgatgatcaacaaggaagccggtacagtgtgattccacagattcaaaaagtgtgtgaagttgtagatgggttcatctatgttgcaaatgctgaagctcataaaagacatgaatggcaagatgaattttctcatattatggcaatgacagatccagcctttgggtcttcgggaagaccattgttggttttatcttgtatttctcaaggggatgtaaaaagaatgccctgtttttatttggctcatgagctgcatctgaatcttctaaatcacccatggctggtccaggatacagaggctgaaactctgactggttttttgaatggcattgagtggattcttgaagaagtggaatctaagcgtgcaagatgattctcttttcagatcttgggaactgaaaccatttgaaatttattactaaggtcgtgatgtgaatatttgctcagtcagcccaccttgtcctgcctttttgcagataggctttcatttggacagctataactgctgtgttttttatattatttttactctttaccataaatcaattacaagaaaagagtttcagtcctagtatttagccccaaaatgaacctttaaacatttttttggtaatttttatattttctgtctttttaaaaatattaaattctggaaaaaacaaaaaaaaaaaa

SEQ ID NO: 89 - DNA, 894 bp, Homo sapiens
  CDS (72)..(536)
ggccaagtagagctccgtcctgacgcgccgcctcccgtgggctccggccggctaagccgcggcggacaactatgctgaaagccaagatcctcttcgtggggccttgcgagagtggaaaaactgttttggccaactttctgacagaatcttctgacatcactgaatacagcccaacccaaggagtgaggtttgagtcctgctggccggccctgatgaaggatgctcatggagtggtgatcgtcttcaatgctgacatcccaagccaccggaaggaaatggagatgtggtattcctgctttgtccaacagccgtccttacaggacacacagtgtatgctaattgcacaccacaaaccaggctctggagatgataaaggaagcctgtctttgtcgccacccttgaacaagctgaagctggtgcactcaaacctggaagatgaccctgaggagatccggatggaattcataaagtatttaaaaagcataatcaactccatgtctgagagcagagacagggaggagatgtcaattatgacctagccagccttcacctgggactgccacatccccagtgaaatcagcatgtttctcggtgcagatctgaaatcacatccagctcctgatgttttcttctccctctgactgcagaggaagtgttcctacctgcaggaaggcacctgtcacacagggcgttcactcagaccatctgtgctctgccctgagttcagttgagaaaatcctattatcaaatttggatttcctggccccagaacttcccaaagacctgtaaaatggagggatttaccacctcacatatgtccagttaaacagtttgtggacttgtaaccgtcgcagcccaatgatacaacagtagtttaatcacgaaaaaaaaaaa

SEQ ID NO: 90 - DNA, 1060 bp, Homo sapiens
  CDS (623)..(1057)
accatgagttcttattatatatatgtatatatccaaattaacaaaattgtgtctgaagttgagtaactaataaaaatgaatcttactctttttttctttttttttaagatggagttttgctcttgtcacccaggcgggagtgcaatggcgtgatctcggctcactgcaaccttcgcctcctgggttcaagcgattctcctgcctcagccccccaagtagctgggattacagatgcccgctaccacgcctggctaatttttgcgtacagacggggtttcaccatgttggccaggctggtctcaaactcctgacctcaagtgatctgcccgccttggcctcccaggtccagtgtaaactcgtggtccctgcatctgcagaaaggcacatttcccctctgcagcgcggactgattgcgttctcgctgcgtccagatccagggctcgccggcgacagagccagtctcggggtcccactgtgcggataccggattggtaatccgaggcggagccctaagcgcacacgccattgcgcccggacagcggctgtctcatgctctgcatacagcaagtgcttatatcaattcaggccgaatgtgggacacagtgcatctaccccaaaagcgatgtgtcagaccacggccgcaggggagggtgcgcacgccgcggacgagggctacacacaaagagtagtgggagcgaggcgagggacacctcaacgctacacgggcggggcagagactaagaaccgagcctttcgcagctaccccaaaatggagacctcttggccgcgcggcggagggagcaccccgcctgtagcactggatgcacaagtggagcgcgagtgcgctctagggtctggcgcgcagggcaagcactcgtgcctggctgtgcgggttgtgcttatattttgcattaacgaacattacccccaaacactcacctaccgattacctttcgtgcttcctctccgctcagggggaaccccaacctcctggagagctctgttctttcccagttccagcgactctaactgtaagctctgtgggggcacgagctcatag

SEQ ID NO: 91 - DNA, 1349 bp, Homo sapiens
  CDS (329)..(829)
gacaggaccgtgtttgttgggaatttagaggcccgagttcgggaagagattctgtacgagctgttccttcagtttcttataggcggggccactaaccaaagtgactatatgcaaagacagagaaggaaagccaaagtcttttggatttgtctgctttaaacacccagaatcggtgtcttatgccatagctttgctgaatggaattcgtttatatggaagaccaattaacgtgcagtatcgatttgggagttctcgctcttctgaaccagctaaccaaagttttgagagctgtgttaagataaattcacacaactacaggaatgaagaaatggtggtgggcagatcttcctttcccatgcagtattttccaattaataatacttctttacctcaagaatattttctctttcagaagatgcagtggcatgtgtataatccagtgctgcagcttccttactatgaaatgacagctccacttcctaatagtgcatccgtgtcttcctcactgaatcatgttccagatcttgaggctggacccagctcatataaatggactcaccaacaaccaagtgactctgacctttatcagatgacagctccacttcctaatagtgcatccgtgtcttcctcactgaatcatgttccagatcttgaggctggacccagctcatataaatggactcgccaacaaccaagtgactctgacctttatcagatgaataaacgaaagagacaaaagcaaacaagtgatagtgatagtagcacagacaacaacagaggcaacgaatgtagccaaaagttccgaaagtctaagaagaagaaaagatactagtattacctacaaatgaaacttacctacactgatcttagttctcttatgaaaaaaaataagatgttatcccatcaaataaacaatgtcatggctatcttgtcttttgaaatatgtagtaataagacttatctctggtttgctgttcaatttttgccttgaacgacaaaagctttctaaaaatagtataatgtaccactttttgtatttgtcatgatatttttgacccattggcaacaaatagactattgtcattttattagtaccaatgatgaaatttcaccaaactattaatcaaaagtcacttattgaacacattgataaagcatcatgttccctttgattatcccctataaccaacactcaactacaaataggctgggattcaatgtggagtggtggatttcctgaaagaaagtagtgcagatatttaaggattgcatattggtcctaatgaggatgtaataaacaggcattagtacccctttcttttagtacctaaatatgttgtttctgagcc

SEQ ID NO: 92 - DNA, 2840 bp, Homo sapiens
  CDS (163)..(1287)
tgaaaatcttgttgattctggggagccgagcgcgcggcgcgagcgtcacgccagacagcggcccgcgcgccttctcctcggcgtcggccgccgccgcctcccagaacctcctcgtgccctcgcgtgccaggcccgcggcggccgaaatccgcggttcacagcatgtccgcctcggcccctgctgcggagggggagggaacccccacccagcccgcgtccgagaaagaacccgaaatgcccggtcccagagaggagagcgaggaggaagaggacgaggacgacgaggaggaggaggaggaggaaaaagaaaagagtctcatcgtggaaggcaagagggaaaagaaaaaagtagagaggttgacaatgcaagtctcttccttacagagagagccatttacaattgcacaaggaaaggggcagaaactttgtgaaattgagaggatacatttttttctaagtaagaagaaaaccgatgaacttagaaatctacacaaactgctttacaacaggccaggcactgtgtcctcattaaagaagaatgtgggtcagttcagtggctttccatttgaaaaaggaagtgtccaatataaaaagaaggaagaaatgttgaaaaaatttagaaatgccatgttaaagagcatctgtgaggttcttgatttggagagatcaggtgtaaatagtgaactagtgaagaggatcttgaatttcttaatgcatccaaagccttctggcaaaccattgccgaaatctaaaaaaacttgtagcaaaggcagtaaaaaggaacggaacagttctggaatggcaaggaaggctaagcgaaccaaatgtcctgaaattctgtcagatgaatctagtagtgatgaagatgaaaagaaaaacaaggaagagtcttcagatgatgaagataaagaaagtgaagaggagccaccaaaaaagacagccaaaagagaaaaacctaaacagaaagctacttctaaaagtaaaaaatctgtgaaaagtgccaatgttaagaaagcagatagcagcaccaccaagaagaatcaaaacagttccaaaaaagaaagtgagtctgaggatagttcagatgatgaacctttaattaaaaagttgaagaaaccccctacagatgaagagttaaaggaaacaataaagaaattactggccagtgctaacttggaagaagtcacaatgaaacagatttgcaaaaaggtctatgaaaattatcctacttatgatttaactgaaagaaaagatttcataaaaacaactgtaaaagagctaatttcttgagatagaggacagagaagatgactcgttcccatagatttgaagatctgatttataccattataccagcaaagagaatgtatttccttttctaaatccttgttaagcaacgttagtagaacttactgctgacctttttatcttgagtgttatgtgaatttgagtttgctgttttaaattgcatttctatgccatttttagtttaaaatcttgcatggcattaattgttccttgcttttatagttgtattttgtacattttggatttctttatataaggtcatagattcttgagctgttgtggtttttagtgcacttaatattagcttgcttaaggcatacttttaatcaagtagaacaaaaactattatcaccaggatttatacatacagagattgtagtatttagtatatgaaatattttgaatacacatctctgtcagtgtgaaaattcagcggcagtgtgtccatcatattaaaaatatacaagctacagttgtccagatcactgaattggaacttttctcctgcatgtgtatatatgtcaaattgtcagcatgacaaaagtgacagatgttatttttgtatttttaaaaaacaattggttgtatataaagtttttttatttcttttgtgcagatcactttttaaactcacataggtaggtatctttatagttgtagactatggaatgtcagtgttcagccaaacagtatgatggaacagtgaaagtcaattcagtgatggcaacactgaaggaacagttaccctgctttgcctcgaaagtgtcatcaatttgtaattttagtattaactctgtaaaagtgtctgtaggtacgttttatattatataaggacagaccaaaaatcaacctatcaaagcttcaaaaactttgggaaagggtgggattaagtacaagcacatttggcttacagtaaatgaactgatttttattaactgcttttgcccatataaaatgctgatatttactggaaacctagccagcttcacgattatgactaaagtaccagattataatgccagaatataatgtgcaggcaatcgtggatgtctctgacaaagtgtgtctcaaaaataatatacttttacattaaagaaatttaatgtttctctggagttggggctcttggctttcagagtttggttaatcagtgttgattctagatgatcaacataatggaccactcctgaatgagacttaattttgtctttcaaatttactgtcttaaatcagtttattaaatctgaattttaaaacatgctgtttatgacacaatgacacatttgttgcaccaattaagtgttgaaaaatatctttgcatcatagaacagaaatatataaaaatatatgttgaatgttaacaggtattttcacaggtttgtttcttgatagttactcagacactagggaaaggtaaatacaagtgaacaaaataagcaactaaatgagacctaataattggccttcgattttaaatatttgttcttataaaccttgtcaataaaaataaatctaaatcaaaaaaaaaaaaa

SEQ ID NO: 93 - DNA, 1258 bp, Homo sapiens
  CDS (111)..(977)
taagcttgcggccgctcctcgcctggctgcagcggcggcagccccagtgctgcccctgtgcggcgcccctttcccgctccgccgcgcactgttgtcatggaggaaccaagatggcggctctggcctacaacctgggcaagcgggagatcaaccactacttcagcgtgaggagcgccaaggtgctggcgctggtggccgtgctgctgctcgcagcgtgccacctcgcctcccgccgctaccgaggcaatgattcgtgtgaataccttctctcaagtggcagatttcttggagagaaagtttggcaacctcacagttgtatgatgcataaatacaaaatcagtgaagcaaagaactgccttgtagataaacatattgcatttattggagattccagaattcgtcaattgttttattcttttgtaaaaataattaatccccaattcaaagaagaaggaaataagcatgaaaacattccttttgaagacaagactgcatcagttaaagtggattttctgtggcatcctgaagttaatggttctatgaaacagtgtatcaaagtgtggactgaggattccattgcaaagccacatgtgattgtagcaggagctgccacatggtccatcaagattcacaatggtagcagtgaagcgctttctcaatataaaatgaacatcacctccatagcaccacttttagaaaaattggcaaagactagtgatgtttattgggtcttacaagatcctgtttatgaagatctattaagtgaaaataggaagatgatcactaatgagaagatagatgcttacaatgaagctgcagtcagtattttgaatagtagcaccagaaattctaaatcaaatgttaagatgttcagtgtttccaaattaattgctcaagaaaccatcatggaatctttggatggcttacatcttcctgaatcgagcagagaaactgtgagaaatttttacatatgtcagtagatggagactataatatcaattgctttaagccataagtcattataacatggttataaataatttgttttattgcagtcttagtaacttgtagttattgtgtataaagatacatctagaaattattttgctttctatcatctagttgaatatatacgtaagagttttggtatactccaagagagaaagaagttagggaagaggggaaattaaacttcatttactgagtgctaatcactgttaatatacattgtctctcagaagcatatatgttctcagcc

SEQ ID NO: 94 - DNA, 1213 bp, Homo sapiens
  CDS (111)..(932)
taagcttgcggccgctcctcgcctggctgcagcggcggcagccccagtgctgcccctgtgcggcgcccctttcccgctccgccgcgcactgttgtcatggaggaaccaagatggcggctctggcctacaacctgggcaagcgggagatcaaccactacttcagcgtgaggagcgccaaggtgctggcgctggtggccgtgctgctgctcgcagcgtgccacctcgcctcccgccgctaccgaggcaatgattcgtgtgaataccttctctcaagtggcagatttcttggagagaaagtttggcaacctcacagttgtatgatgcataaatacaaaatcagtgaagcaaagaactgccttgtagataaacatattgcatttattggagattccagaattcgtcaattgttttattcttttgtaaaaataattaatccccaattcaaagaagaaggaaataaggattttctgtggcatcctgaagttaatggttctatgaaacagtgtatcaaagtgtggactgaggattccattgcaaagccacatgtgattgtagcaggagctgccacatggtccatcaagattcacaatggtagcagtgaagcgctttctcaatataaaatgaacatcacctccatagcaccacttttagaaaaattggcaaagactagtgatgtttattgggtcttacaagatcctgtttatgaagatctattaagtgaaaataggaagatgatcactaatgagaagatagatgcttacaatgaagctgcagtcagtattttgaatagtagcaccagaaattctaaatcaaatgttaagatgttcagtgtttccaaattaattgctcaagaaaccatcatggaatctttggatggcttacatcttcctgaatcgagcagagaaactgtgagaaatttttacatatgtcagtagatggagactataatatcaattgctttaagccataagtcattataacatggttataaataatttgttttattgcagtcttagtaacttgtagttattgtgtataaagatacatctagaaattattttgctttctatcatctagttgaatatatacgtaagagttttggtatactccaagagagaaagaagttagggaagaggggaaattaaacttcatttactgagtgctaatcactgttaatatacattgtctctcagaagcatatatgttctcagcc

SEQ ID NO: 95 - DNA, 1048 bp, Homo sapiens
  CDS (565)..(1014)
  misc_feature (1)...(1048): n = a,t,c or g
attaaaagtttgacccgntcggacccacccgttttccaaaaccgggctcagctcggttagtgggcggggggaaatttcccagaccctaccccttgctttagtcctaaaaacagtggcaaaaacagctgtcggtcgattccggaatttcaccccgttcgcaaagtaagatggagaaagctgcggaagggtaggaagtcagcagccactccggcataagtagatcccagctttgggcggtattttttgccacatcagttgaggggtaaaccagtccctcgcggccttgaggagcaggcccagaaataaagtcttaaggggtccggtggctttggccctagagtgttatcaacacctcccagcccttgggccctttagaagtgtcccccgtgctggccgggacacgttccaagctcgggttagagggtattttccgggacctcgcttttatagcacaacgagggcagagtccattggtctgcgaaaagaanccgcgctaactagtttgtctctacggcggcctcgtagtcactgccgcggcgccttgagtctccgggccgccttgccatggctgcccgtggtgtcatcgctccagttggcgagagtttgcgctacgctgagtacttgcagccctcggccaaacggccagacgccgacgtcgaccagcagggactggtaagaagtttgatagctgtaggactgggtgttgcagctcttgcatttgcaggtcgctacgcatttcggatctggaaacctctagaacaagttatcacagaaactgcaaagaagatttcaactcctagcttttcatcctactataaaggaggatttgaacagaaaatgagtaggcgagaagctggtcttattttaggtgtaagcccatctgctggcaaggctaagattagaacagctcataggagagtcatgattttgaatcacccagataaaggtggatctccttacgtagcagccaaaataaatgaagcaaaagacttgctagaaacaaccaccaaacattgatgcttaaggaccacactgaaggaaaaaaaaa

SEQ ID NO: 96 - DNA, 1233 bp, Homo sapiens
  CDS (1)..(1230)
atgggcgaggggaaacttaaatcatcatcccggggcagccacggcggctccatgcgtgaggctggtgccacgcggtctcccggtgttggcattgtctccaggccttctcctcagttctgcacacagctacaaaacaaaagaacagttgccagcacttggaagaggatgtggatccaaaccaaatggaggacagatactccctctatggacaagatactcatggaagaagtcaagttagaagagcagctgaaggaggctgtggaagaagataagcaagcactggcagatactgagggctcagagcagagcagccaaaaattggtggaggagggaaatatgtatagcattcagggcttctgcaaggactcgttagaggttgcagatgttttggagaaggcaacacagtgtgttccagaagaagaaattaaagacaataaccctcacctgaagaacctctctctatgggaccatctagttgcaggaaaagaaggtcaagactcccagtcattctacattatgtctatggaaaaactgtcttccacaaaactggtccctgctcccccaaaaattggggaccgctgcactcaacacagagagaaaaacaaaaagctcaagtctttacctctcagccctcagccaagatgtctcaccccactctctctgatgcaacaagaagcccctggagaacgtttcagtcccattttgtacttctgtcatgtgctcatcacagtctggttgcctgacctgctgagacctgtgtttgctatccctgcagatgggtggctaccacttaatgttgattgtgatgaaatgccagccgaggcatatgccattcaagctaagggtgctacacttgaccactgcggcagtatagatgagtctgaagaatggtatgggatggatacttacgaatgcactcgagcaggggtctccatccacagggccacagagccagaggtgagcagcaggcccagaactgtttccagtggccctctccaggcccggctctccatccgggccgcgtccagcggtcccaacccctgcctcacgacaaccacgtttggcccagctcctggtagcctttgtaggccccaggctcctcgaaagatcttgataggggaagtcctccttgatgctctgccaagacatgaagtaaccttgccctcctctggagtcccacggtacttcctctgtgtttgtcttgtggattctcagtacctgactcgtctttag

SEQ ID NO: 97 - DNA, 3746 bp, Homo sapiens
  CDS (9)..(2141)
ggggcagaatgctggatggcccactgttctccgaggggcctgacagcccccgggagctccaggatgaggagtctggcagctgcctctgggtgcagaagtccaagctattggtgatagaagtgaagactatttcctgtcattatagtcgccgcgccccttctcgacagcccatggacttccaggccagccactgggctcgcgggttccagaaccgcacgtgtgggccgcgcccgggatccccacagccgccgccccgccggccctgggcctccagggtgctgcaggaggcgaccaactggcgggcggggcccctggccgaggtccgagctcgggagcaagagaaaaggaaagcggcgtcgcaggagcgggaggccaaggagaccgagcgaaaaaggcgcaaggctggtggggcccgacggagccccccgggtcgaccccgcccggagccccgcaacgcccctcgggtggcccagctggcagggctccctgctcccttgcggccggagcgcctggcgcctgtggggcgagcgccccgtccatccgcgcagccgcagagcgacccagggtcggcgtgggcggggccctggggaggtcggcggcccgggcccccaagctacgaggctcacctgctgctgagaggttctgccgggaccgccccacgacgccgctgggaccggccgccaccctacgtggctccaccttcttacgaaggcccccataggaccttggggactaagagaggccccgggaactctcaggtgcccacttcatcagccccagctgcgactccagccaggacagacggagggcgcacaaagaagaggctggatcctcggatctaccgggacgtcctcggggcttggggtctccgacaggggcaaggtctcttggggggatccccaggctgtggagcggccagagcaaggccagagcccggcaagggggtcgtggagaaaagcctggggctggctgctgctgacctgaacagtggtagcgacagccatccccaagccaaagctacagggagcgcaggcaccgagatagctcctgcggggtctgcaactgcggctccctgtgccccgcatcccgctcccagatccaggcaccacctcaagggctcgagggaagggaaagaaggagaacagatctggtttcccaaatgctggattccctcccctaaaaagcagccgccccgccatagccagacactccccagaccctgggctcccggaggcaccggatggagagaatctctgggtcttggagagggggcaggaccggagaccctggagggttggaaggcgacccgccgtgcccacaccttgccccgcagttcccagggcctgtcccgtggggaaggcgtctttgtcattgacgccacgtgcgtagtgatacgatcccaatatgttccaaccccccgaacccagcaggtgcagcttttgccctctggggtgacacgcgtggtgggggattcccccagccaatcgaagcccggcaaggaggagggtgaaggggccacggtctttccttccccttgtcaaaagcggctgtcgagcagtcgccttttacaccagcccggcgggggccgcgggggcgaagctgagggcgggaggccgggggactccacactggaggagcgcactttccgcatcttggggctcccggcccccgaagtaaacctgcgggacgcccccacgcagccaggtagcccagagcaccaagccttaggcccagcagcttcgggagcccagggcagagccgaggggtcggaagtggcggtggtccagcggcgcgccggccggggctgggcgcggaccccagggccctacgccggggccctgcgagaagccgtgtcccgtatccgccgccacacagcccctgactcggacacggacgaagctgaggagctcagcgtccatagcggctcctctgatggaagcgacacagaagccccgggcgcctcctggcggaatgagaggaccctgcccgaggttggaaacagttcgccagaggaagatgggaagacagcggaactgagcgacagtgtcggggagatcctagatgtcataagccaaaccgaggaggtcctcttcggggtgagggacatcagagggacccaacagggaaataggaagaggcagtgagaggccccttcttgtatttgtgtccccaacgcatccatccttgggtccactggtccccattcttccccacagacttcctttgcttctcttttccttgtatctttacccatacctgttctcatccttgaaatataaatgaaaggaagggaagcatatgcccattaatgattttgtttcaggagaggtgagaatgagcagatttaattaatgtctgttatgttcagggcacaagggtgagctcttcgcaggggctgatgcactgggtgtggagctgagcagagaggcctaaccaggatcaggcaggagggcagggatggtggcagccataggagggcagggtagggtagggcctctgaggaggagggaaaaagtgaaggagaggctttggacctggtgacagagtgatcagatgacagaggggttcttgggagaagaggcataggtccagcaacaaccaacaaagcagaaggagggctcaccttggtgtcacaagtcttggatttcaatcccaactctgccactgagttgctggttgactgaggccagtcactttccctctccaggcctccaggcctcctggtatataaaatgatggtattctaaggtccatccttccgtctctgacattttgagatctttggaaaggactctatctcatcctcccctcgacaagccaagaatgagaattgggaataagtgaacagagtttgagggtttctgggcggcctccgtgtcacccaaagtcatgatcaattcaggagactgcccaaggcttgcagaagaggtaagggagtgaggcactcctatcccagtctcccaggtttggttgagggctccccaaggcagggcaagatagcggccctgtcactgaccctggcctgtggtggtctgagctggggagggaaggacaccaatgaatcagcttgggacctctttaggccttccccttttcctccaccccgatgctccttagtgatgctctgaggcgtggccacgatctccctcccaggtggtatcgcccacctgaaaaaatcctgagaatttctcccatcttggcctcttccagaaaccggccaggcaaggaaagaggccggtcaccagaagccagcaggcgtggggtgtgatactctctatagccactacagggcgcgcgcaggtcgcggatctccccagttgctaatcccggctctgccactcaatcctatccctagttcccgagcgcgggtcccccgccttgcagtctccagccgtgcggggccgggagcaggcctccggcctcccagacttctagagcccgccgggcccatctttgtactcatccaccccagccggcttgggactcagacaccgaagtctttttttttttctctccgatccttggacacctcctctgtctgccatttattagccatgtgaacttggccacatcacttcacctccctgagcctcagtttcctcatctgtcaaatgggggtttataaacacctacctcgcagggttgttgtgaggatttaatgcgataatgtatgtaaagcgccttgcacactgcctggcacacagtaggcgctcaataaatctaagcttccctttaaaaaaaaaaaa

SEQ ID NO: 98 - DNA, 986 bp, Homo sapiens
  CDS (327)..(929)
atgcctttccctttcgctcctgctccaggctccgcctccgccgtgtccgggctgctcgccccgcccccgctcgccccgcccccgctcgccccgcccccgctcgccccgcccccgctcgccccgcccccgctcgccccgcccccgctcgccccgcccccgctcgccccgcccctggatttgctccctcaaagcggaggtgaggccggactgaggctcttacagtggtccctgctggcccttggtgacgggtcgcgtcagttccgacccggacccgtacgctgctgcgctgacgtggctcctggaagcagggctggcgtagggccgccatgttgcagcaggatagtaatgatgacactgaagatgtttcactgtttgatgcggaagaggagacgactaatagaccaagaaaagccaaaatcagacatccagtagcatcgtttttccacttattctttcgagtcagtgcaatcatcgtctgtcttctctgtgagttgctcagcagcagctttattacctgtatggttacaattatcttgttgttgtcgtgtgacttttgggcagtgaagaatgtcacaggtagactaatggttggcctacgttggtggaatcacattgatgaagatggaaagagccattgggtgtttgaatctagaaaggagtcctctcaagagaataaaactgtgtcagaggctgaatcaagaatcttttggttgggacttattgcctgttcagtactgtgggtgatatttgcctttagtgcactcttctccttcacagtaaagtggctggcggtggttattatgggtgtggtgctacaaggtgccaacctgtatggttacatcaggtgtaaggtgcgcagcagaaagcatttaaccagcatggctacttcatattttggaaagcagtttttaagacaaaacacgtggagatgatcagacttcctgaatagagaaagcttatgtgctttgttacattggggaacaact

SEQ ID NO: 99 - DNA, 1250 bp, Homo sapiens
  CDS (621)..(1193)
ggaacttgctaatctcttttgtcacattcggattgctcctgctgccccacacacactaacccaaccatcttggggtggactccctgccagcccaactgttgtattttcagttcttccagtgtgaatcagttaatattctcgggaacgagggagaggttgatcctatgaggaaatcaaccacagtgaaaaggcttgggccgcttttgttttcacctgcttttgttgaacaaatttgatttccggagtcagtcattttactgtcaagacatttcttcggcattctgcaacagtttccaacatggctagatccatcagaaactgaagccgtggagaacgctctcggggcctttgccacttcttggagtagaagccgacagagagctgtttggaaacttctccttcacacaccagttgaagactaggctttggaggttttcaaagcagacggtgcttggatgggcagggagaagtaacattctgcaaatcgccgtcagaggtcctgaggacacagacctacctggcttgcattccccttgctgaatggcgtgtgctgcagctgcccactgagggctcttttccctgggattctggacttcagagtaggacagcaggctgggaagatgctgagttccatcaagtgcgtgttggtgggcgactctgctgtggggaaaacctctctgttggtgcgcttcacctccgagaccttcccggaggcctacaagcccacagtgtacgagaacacaggggtggacgtcttcatggatggcatccagatcagcctgggcctctgggacacagccggcaatgacgccttcagaagcatccggcccctgtcctaccagcaggcagacgtggtgctgatgtgctactctgtggccaaccataactcattcctgaacttgaagaacaagtggattggtgaaattaggagcaacttgccctgtacccctgtgctggtggtggccacccagactgaccagcgggagatggggccccacagggcctcctgcgtcaatgccatggaagggaagaaactggcccaggatgtcagagccaagggctacctggagtgctcagcccttagcaatcggggagtacagcaggtgtttgagtgcgccgtccgaactgccgtcaaccaggccaggagacgaaacagaaggaggctcttctccatcaatgagtgcaagatcttctaaaccccaagagacttcacacaacacttatgtatgcaccccaaagactaatgggga

SEQ ID NO: 100 - DNA, 1398 bp, Homo sapiens
  CDS (114)..(1352)
tttcgtgcgccgaccaagggtccattggttgccatagagatcgtcgagcgctgggcctgtgatcgctgaggggcgagcagttgcgaccctgggctcctggggacctgagcgttatgtctttccgcgacctccgcaatttcacagagatgatgagagccctgggataccctcgacatatttctatggaaaatttccgtacacccaattttggacttgtatctgaagtgcttctctggcttgtgaaaagatatgagccccagactgacatcccgcctgacgtggatactgaacaggaccgagttttcttcattaaggcaattgcccagttcatggccaccaaggcacatataaaactcaacactaagaagctttatcaagcagatgggtatgcggtaaaagagctgctgaagatcacatctgtcctttataatgctatgaagaccaaggggatggagggctctgaaatagtagaggaagatgtcaacaagttcaagtttgatcttggctcaaagattgcagatttgaaggcagccaggcagcttgcgtctgaaatcacctccaaaggagcatctctgtatgacttgctcggcatggaagtagagttgagggaaatgagaacagaagccattgccagacctctggaaataaacgagactgaaaaagtgatgagaattgcaataaaagagattttgacacaggttcagaagactaaagacctgctcaataatgtggcctctgatgaagctaatttagaagccaaaatcgaaaagagaaaattagaactggaaagaaatcggaagcgactagagactctgcagagtgtcaggccatgttttatggatgagtatgagaagactgaggaagaattacaaaagcagtatgacacttatctggagaaatttcaaaatctgacttatctggaacaacagcttgaagaccatcataggatggagcaagaaaggtttgaggaagctaaaaacactctctgcctgatacagaacaagctcaaggaggaagagaagcgcctgctcaagagtggaagtaacgatgactcggacatagacatccaggaggacgatgaatccgacagtgagttggaagaaaggcggctgcccaagccacagacagccatggagatgctcatgcaaggaagacctggcaaacgcattgtgggcacgatgcaaggtggagactccgatgacaatgaggactcggaggagagtgaaattgacatggaagatgatgatgacgaggatgacgatttggaagacgagagcatttctctctcaccaaccaagcccaatcgaagggtccggaaatctgaacccctggatgagagtgacaatgacttctgacccttttgccaagggaccctggcagattaaaaccctcagactt

SEQ ID NO: 101 - DNA, 1648 bp, Homo sapiens
  CDS (1)..(1272)
atggaggcagctcagtcatcttctacggcctcatctgcatgtatacactgtggtggatgctacgggcgctccctcaaaaagtactcgtttgagtcgatccgtgaggagagcagctacagcgacatccccgacgtcaagaacgacttcgccttcatgctgcacctcattgaccaatacgacccgctctactccaagcgcttcgccgtcttcctgtcggaggtgagtgagaacaagctgcggcagctgaacctcaacaacgagtggacgctggacaagctccggcagcggctcaccaagaacgcgcaggacaagctggagctgcacctgttcatgctcagtggcatccctgacactgtgtttgacctggtggagctggaggtcctcaagctggagctgatccccgacgtgaccatcccgcccagcattgcccagctcacgggcctcaaggagctgtggctctaccacacagcggccaagattgaagcgcccgcgctggccttcctgcgcgagaacctgcgggcgctgcacatcaagttcaccgacatcaaggagatcccgctgtggatctatagcctgaagacactggaggagctgcacctgacgggcaacctgagcgcggagaacaaccgctacatcgtcatcgacgggctgcgggagctcaaacgcctcaaggtgctgcggctcaagagcaacctaagcaagctgccacaggtggtcacagatgtgggcgtgcacctgcagaagctgtccatcaacaatgagggcaccaagctcatcctgtggtacaaccacatcgcctacatccccatccagatcggcaacctcaccaacctggagcgcctctacctgaaccgcaacaagatcgagaagatccccacccagctcttctactgccgcaagctgcgctacctggacctcagccacaacaacctgaccttcctccctgccgacatcggcctcctgcagaacctccagaacctagccatcacggccaaccggatcgagacgctccctccggagctcttccagtgccggaagctgcgggccctgcacctgggcaacaacgtgctgcagtcactgccctccagggtgggcgagctgaccaacctgacgcagatcgagctgcggggcaaccggctggagtgcctgcctgtggagctgggcgagtgcccactgctcaagcgcagcggcttggtggtggaggaggacctgttcaacacactgccacccgaggtgaaggagcggctgtggagggctgacaaggagcaggcctgagcgaggccggcccagcacagcaagcagcaggaccgctgcccagtcctcaggcccggaggggcaggcctagcttctcccagaactcccggacagccaggacagcctcgtggctgggcaggagcctggggccgcttgtgagtcaggccaaagcgagaggacagtatctgtggggctggccccttttctccctctgagactcacgtcccccagggcaagtgcttgtggaggagagcaagtctcaagagcgcagtatttggataatcagggtctcctccctggaggccagctctgccccaggggctgagctgccaccagaggtcctgggaccctcactttagttcttggcatttatttgtctccatctgccacctgc

SEQ ID NO: 102 - DNA, 2250 bp, Homo sapiens
  CDS (487)..(1686)
agtcctctcggcctctgtgcgctcagttgtttacctaggcgtccgggggaggcacactcgcgggactcgcgggactcggccccggcctcccagctcgcccaggacacgacgctggttctgcgggctctcggagcccagcgcgaatcccccgggctaattcccaagaaccgagaggcagcactgcctggaggctgcccccgcctccgcgcccccgtcctcactttctgaggctgttagcagagagtcccgcgggccggggagaagcgggacgcgggggatggcctcgcagcgccctgtgagcgtcggcagtagtcaggcagccaggcctccttgggcgatcgccctgggtagaggagaggagtttccggggctcgggtccgggtcgccttccaggggaacgagcgcggaagcaagtgggcggcgagaggcggagcaagagacgctggagggcgtggacgcagcgggctttggaaaggccccaagttaatgaggcgtgcgccggctgccgagcgcctcttggagctgggctttcccccgcggtgcgggcgccaggagccgccttttccgctgggtgtcactcgggggtggggaagatggcccattcaaaagcgccgcgagggggcccggccagtgcccttcagtgagcgctcgcaagaggacggcagaggcccggcagctcggagctccgggaccttgtggcgcatcaggacgcggctgtccctctgccgggacccagagccgccgccgccgctctgcctcctgcgtgttagcctcctctgcgcgctccgggcaggcggccgtgggagccgctggggcgaggacggcgcgaggctgctgctgctgcccccggcccgcgcggctggaaacggagaggccgagccaagcggcggcccctcttatgctgggaggatgctggagagtagcggctgcaaagcgctgaaggagggcgtgctggagaagcgcagcgacgggttgttgcagctctggaagaaaaagtgttgcatcctcaccgaggaagggctgctgcttatcccgcccaagcagctgcaacaccagcagcagcagcaacagcagcagcagcagcagcaacaacagcccgggcaggggccggccgagccgtcccaacccagtggccccgctgtcgccagcctcgagccgccggtcaagctcaaggaactgcacttctccaacatgaagaccgtggactgtgtggagcgcaagggcaagtacatgtacttcactgtggtgatggcagagggcaaggagatcgactttcggtgcccgcaagaccagggctggaacgccgagatcacgctgcagatggtgcagtacaagaatcgtcaggccatcctggcggtcaaatccacgcggcagaagcagcagcacctggtccagcagcagcccccctcgcagccgcagccgcagccgcagctccagccccaaccccagcctcagcctcagccgcaaccccagccccaatcacaaccccagcctcagccccaacccaagcctcagccccagcagctccacccgtatccgcatccacatccacatccacactctcatcctcactcgcacccacaccctcacccgcacccgcatccgcaccaaataccgcacccacacccacagccgcactcgcagccgcacgggcaccggcttctccgcagcacctccaactctgcctgaaaggggcagctcccgggcaagacaaggttttgaggacttgaggaagtgggacgagcacatttctattgtcttcacttggatcaaaagcaaaacagtctctccgccccgcaccagatcaagtagtttggacatcaccctactgaaaacttgcgattcttcttagttttctgcatacttttcatcacgatgcaggaaacgatttcgagtcaagaagacttttatttatgaacctttgaaaggatcgtcttgtatggtgaattttctaggagcgatgatgtactgtaattttattttaatgtattttgatttatgattatttattagttttttttaaatgcttgttctaagacatttctgaatgtagaccattttccaaaaaggaaactttattttcaaaaacctaatccgtagtaattcctaatcttggagaataaaaaagggcggtggaggggaaaacattaagaatttattcattatttctcgagtactttcagaaagtctgacactttcattgttgtgccagctggttgaaattaaaactctgatattaaaaaaaaaaaa

SEQ ID NO: 103 - DNA, 4050 bp, Homo sapiens
  CDS (1)..(3816)
atggcccgcaccgtggtgctcatcaccggctgttcctcgggcatcggcctgcacttggccgtacgtctggcttcagatccatcccagagcttcaaagtgtatgccacgttgagggacctgaaaacacagggccggctgtgggaggcggcccgggccctggcatgccctccgggatccctggagacgttgcagctggacgtaagggactcaaaatccgtggccgctgcccgggaacgcgtgactgagggccgcgtggacgtgctggtgtgtaacgcaggcctgggcctgctggggccgctggaggcgctgggggaggacgccgtggcctctgtgctggacgtgaatgtagtagggactgtgcggatgctgcaggccttcctgccagacatgaagaggcgcggttcgggacgcgtgttggtgaccgggagcgtgggaggattgatggggctgcctttcaatgacgtttattgcgccagcaagttcgcgctcgaaggcttatgcgagagtctggcggttctgctgctgccctttggggtccacagcttgagcctgatcgagtgcggcccagtgcacaccgccttcatggagaaggtgttgggcagcccagaggaggtgctggaccgcacggacatccacaccttccaccgcttctaccaatacctcgcccacagcaagcaagtctttcgcgaggcggcgcagaaccctgaggaggtggcggaggtcttcctcaccgctttgcgcgccccgaagccgaccctgcgctacttcaccaccgagcgcttcctgcccctgctgcggatgcgcctggacgaccccagcggctccaactacgtcaccgccatgcaccgggaagtgttcggcgacgttccggcaaaggccgaggctggggccgaggctgggggcggggccgggcctggggcagaggacgaggccgggcgcagtgcgagaccccgcaaacaagcgcatcagaggatctgggtggtgcgagagcctcctacagcagccaggtacacacaaggcctcagtttttccatctgtgaaatgggtacgtggacagacctgtccagtagcctcccatgtgagaatcctcggactgagaggcgggggtccgatcggcatcaaggattcacccactcccagagccttcgggatcagccccaccccatcagcaggacacagcccatgccactggaaatctcgcgagaatcccgcgctgaagcgaagtcgagacgtttgaccttcctccgtttccgtagttccgagttgcggtttctccgcctgggcagcatggccgtattccggtcgggtctcctggtgctgacgacgccgctggcctccctagcccctcgcctggcctccatcctgacctcggcggcccggctggtgaatcacacactctatgttcacctgcagccgggcatgagcctggagggcccggctcagccccagtacagccccgtgcaggccacgtttgaggttcttgatttcatcacgcacctctatgctggcgccgacgtccacaggcacttggacgtcagaatcctactgaccaatatccgaaccaagagcacctttctccctcccctgcccacctcagtccagaatctcgcccacccgccagaagtcgtgttgacagatttccagaccctggatggaagccagtacaacccggtcaaacagcagctagtgcgttacgccaccagctgttacagctgttgtccgcgactggcctcggtgctgctatactccgattatgggataggagaagtgcccgtggagcccctggatgtccccttaccctccacgatcaggccagcttcccccgtggccgggtctccaaagcagccggtgcgtggctactaccgtggcgctgtcggtggcacgtttgaccgcctgcacaacgcccacaaggtgttgctcagtgtcgcgtgcatcctggcccaggagcagcttgtggtgggagtagcagacaaagatctgttgaagagcaagttgctccctgagctgctccaaccttatacagaacgtgtggaacatctgagtgaattcctggtggacatcaagccctccttgacttttgatgtcatccccctgctggacccctatgggcccgctggctctgacccctccctggagttcctggtggtcagcgaggagacctatcgtggggggatggccatcaaccgcttccgccttgagaatgacctggaggaacttgctttgtaccagatccagctgctgaaggacctcagacatacggagaatgaagaggacaaagtcagctcctccagcttccgccagcgaatgttggggaacctgcttcggcctccatatgaaaggccagagctccccacatgtctctatgtaattgggctgactggcatcagtggctctgggaagagctcaatagctcagcgactgaagggcctgggggcgtttgtcattgacagtgaccacctgggtcatcgggcctatgccccaggtggccctgcctaccagcctgtggtggaggcctttggaacagatattctccataaagatggcatcatcaacaggaaggtcctaggcagccgggtgtttgggaataagaagcagctgaagatactcacggacattatgtggccaattatcgcaaagctggcccgagaggagatggatcgggctgtggctgagggaaagcgtgtgtgtgtgattgatgccgctgtgttgcttgaagccggctggcagaacctggtccatgaggtgtggactgctgtcatcccagagactgaggctgtaagacgcattgtggagagggatggcctcagtgaagccgcggctcaaagccggctgcagagccagatgagcgggcagcagcttgtggaacagagccacgtggtgctcagcaccttgtgggagccgcatatcacccaacgccagagcttgcagcctggtggggtcggacgatgtggctgggggcttctctgcccggttcctgacacaccggccagcagtgcaggtccggtggagtatgcctacagcgacaacagcctggaccccgggctttttgtagaaagcacccgcaaggggagtgtagtgtccagagctaatagcatcggttccaccagtgcctcttctgtccccaacacagatgatgaggacagtgattaccaccaggaggcctacaaggagtcctacaaagaccggcggcggcgcgcacacactcaggctgagcagaagaggagggacgccatcaagagaggctatgatgaccttcagaccatcgtccccacttgccagcagcaggacttctccattggctcccaaaagctcagcaaagccatcgttctacaaaagagtatggctagggaaagcactggaggggatggagccaagaggggctgtgaagaggccagtgcctcctacccacccatggctcggccttggtgtggtgattgccatgggatagttggggtctgggccattgactacattcagtttttgcacaaggagaagaaaaagcaggaggaggaggtgtccacgttacgcaaggatgtcaccgccctaaagatcatgaaagtgaactatgagcagattgtgaaggcacaccgggacaacccccatgaaggggaggaccaggtctctgaccaggtcaagttcaacgtgtttcaaggcatcatggattccctgttccagtccttcaatgcctccatctcagtggccagcttccaggagctgtcagcgtgtgtcttcagctggatcgaggagcactgtaagcctcagaccctgcgggagattgtgattggcgtcctgcaccaattgaaaaaccagctttactgaccggttcttggaaacctggagaacagccaacaagaggcccttgaatctctacgtggccactgaactgctgggcccgggagactggactacaacacctcacactggtcagctggtttctacttggtgtttggtttttcccagccccattttatcttcagcggagccgcggtgtttgttttgtgaaagcttctgattaatttattatattgacgataaaactcaaaaaaaaaa

SEQ ID NO: 104 - DNA, 4041 bp, Homo sapiens
  CDS (1)..(3075)
atggcccgcaccgtggtgctcatcaccggctgttcctcgggcatcggcctgcacttggccgtacgtctggcttcagatccatcccagagcttcaaagtgtatgccacgttgagggacctgaaaacacagggccggctgtgggaggcggcccgggccctggcatgccctccgggatccctggagacgttgcagctggacgtaagggactcaaaatccgtggccgctgcccgggaacgcgtgactgagggccgcgtggacgtgctggtgtgtaacgcaggcctgggcctgctggggccgctggaggcgctgggggaggacgccgtggcctctgtgctggacgtgaatgtagtagggactgtgcggatgctgcaggccttcctgccagacatgaagaggcgcggttcgggacgcgtgttggtgaccgggagcgtgggaggattgatggggctgcctttcaatgacgtttattgcgccagcaagttcgcgctcgaaggcttatgcgagagtctggcggttctgctgctgccctttggggtccacagcttgagcctgatcgagtgcggcccagtgcacaccgccttcatggagaaggtgttgggcagcccagaggaggtgctggaccgcacggacatccacaccttccaccgcttctaccaatacctcgcccacagcaagcaagtctttcgcgaggcggcgcagaaccctgaggaggtggcggaggtcttcctcaccgctttgcgcgccccgaagccgaccctgcgctacttcaccaccgagcgcttcctgcccctgctgcggatgcgcctggacgaccccagcggctccaactacgtcaccgccatgcaccgggaagtgttcggcgacgttccggcaaaggccgaggctggggccgaggctgggggcggggccgggcctggggcagaggacgaggccgggcgcagtgcgagaccccgcaaacaagcgcatcagaggatctgggtggtgcgagagcctcctacagcagccaggtacacacaaggcctcagtttttccatctgtgaaatgggtacgtggacagacctgtccagtagcctcccatgtgagaatcctcggactgagaggcgggggtccgatcggcatcaaggattcacccactcccagagccttcgggatcagccccaccccatcagcaggacacagcccatgccactggaaatctcgcgagaatcccgcgctgaagcgaagtcgagacgtttgaccttcctccgtttccgtagttccgagttgcggtttctccgcctgggcagcatggccgtattccggtcgggtctcctggtgctgacgacgccgctggcctccctagcccctcgcctggcctccatcctgacctcggcggcccggctggtgaatcacacactctatgttcacctgcagccgggcatgagcctggagggcccggctcagccccagtacagccccgtgcaggccacgtttgaggttcttgatttcatcacgcacctctatgctggcgccgacgtccacaggcacttggacgtcagaatcctactgaccaatatccgaaccaagagcacctttctccctcccctgcccacctcagtccagaatctcgcccacccgccagaagtcgtgttgacagatttccagaccctggatggaagccagtacaacccggtcaaacagcagctagtgcgttacgccaccagctgttacagctgttgtccgcgactggcctcggtgctgctatactccgattatgggataggagaagtgcccgtggagcccctggatgtccccttaccctccacgatcaggccagcttcccccgtggccgggtctccaaagcagccggtgcgtggctactaccgtggcgctgtcggtggcacgtttgaccgcctgcacaacgcccacaaggtgttgctcagtgtcgcgtgcatcctggcccaggagcagcttgtggtgggagtagcagacaaagatctgttgaagagcaagttgctccctgagctgctccaaccttatacagaacgtgtggaacatctgagtgaattcctggtggacatcaagccctccttgacttttgatgtcatccccctgctggacccctatgggcccgctggctctgacccctccctggagttcctggtggtcagcgaggagacctatcgtggggggatggccatcaaccgcttccgccttgagaatgacctggaggaacttgctttgtaccagatccagctgctgaaggacctcagacatacggagaatgaagaggacaaagtcagctcctccagcttccgccagcgaatgttggggaacctgcttcggcctccatatgaaaggccagagctccccacatgtctctatgtaattgggctgactggcatcagtggctctgggaagagctcaatagctcagcgactgaagggcctgggggcgtttgtcattgacagtgaccacctgggtcatcgggcctatgccccaggtggccctgcctaccagcctgtggtggaggcctttggaacagatattctccataaagatggcatcatcaacaggaaggtcctaggcagccgggtgtttgggaataagaagcagctgaagatactcacggacattatgtggccaattatcgcaaagctggcccgagaggagatggatcgggctgtggctgagggaaagcgtgtgtgtgtgattgatgccgctgtgttgcttgaagccggctggcagaacctggtccatgaggtgtggactgctgtcatcccagagactgaggctgtaagacgcattgtggagagggatggcctcagtgaagccgcggctcaaagccggctgcagagccagatgagcgggcagcagcttgtggaacagagccacgtggtgctcagcaccttgtgggagccgcatatcacccaacgccagagcttgcagcctggtggggtcggacgatgtggctgggggcttctctgcccggttcctgacacaccggccagcagtgcaggtccggtggagtatgcctacactggaccccgggctttttgtagaaagcacccgcaaggggagtgtagtgtccagagctaatagcatcggttccaccagtgcctcttctgtccccaacacagatgatgaggacagtgattaccaccaggaggcctacaaggagtcctacaaagaccggcggcggcgcgcacacactcaggctgagcagaagaggagggacgccatcaagagaggctatgatgaccttcagaccatcgtccccacttgccagcagcaggacttctccattggctcccaaaagctcagcaaagccatcgttctacaaaagagtatggctagggaaagcactggaggggatggagccaagaggggctgtgaagaggccagtgcctcctacccacccatggctcggccttggtgtggtgattgccatgggatagttggggtctgggccattgactacattcagtttttgcacaaggagaagaaaaagcaggaggaggaggtgtccacgttacgcaaggatgtcaccgccctaaagatcatgaaagtgaactatgagcagattgtgaaggcacaccgggacaacccccatgaaggggaggaccaggtctctgaccaggtcaagttcaacgtgtttcaaggcatcatggattccctgttccagtccttcaatgcctccatctcagtggccagcttccaggagctgtcagcgtgtgtcttcagctggatcgaggagcactgtaagcctcagaccctgcgggagattgtgattggcgtcctgcaccaattgaaaaaccagctttactgaccggttcttggaaacctggagaacagccaacaagaggcccttgaatctctacgtggccactgaactgctgggcccgggagactggactacaacacctcacactggtcagctggtttctacttggtgtttggtttttcccagccccattttatcttcagcggagccgcggtgtttgttttgtgaaagcttctgattaatttattatattgacgataaaactcaaaaaaaaaaaa

SEQ ID NO: 105 - DNA, 4041 bp, Homo sapiens
  CDS (1)..(3063)
atggcccgcaccgtggtgctcatcaccggctgttcctcgggcatcggcctgcacttggccgtacgtctggcttcagatccatcccagagcttcaaagtgtatgccacgttgagggacctgaaaacacagggccggctgtgggaggcggcccgggccctggcatgccctccgggatccctggagacgttgcagctggacgtaagggactcaaaatccgtggccgctgcccgggaacgcgtgactgagggccgcgtggacgtgctggtgtgtaacgcaggcctgggcctgctggggccgctggaggcgctgggggaggacgccgtggcctctgtgctggacgtgaatgtagtagggactgtgcggatgctgcaggccttcctgccagacatgaagaggcgcggttcgggacgcgtgttggtgaccgggagcgtgggaggattgatggggctgcctttcaatgacgtttattgcgccagcaagttcgcgctcgaaggcttatgcgagagtctggcggttctgctgctgccctttggggtccacagcttgagcctgatcgagtgcggcccagtgcacaccgccttcatggagaaggtgttgggcagcccagaggaggtgctggaccgcacggacatccacaccttccaccgcttctaccaatacctcgcccacagcaagcaagtctttcgcgaggcggcgcagaaccctgaggaggtggcggaggtcttcctcaccgctttgcgcgccccgaagccgaccctgcgctacttcaccaccgagcgcttcctgcccctgctgcggatgcgcctggacgaccccagcggctccaactacgtcaccgccatgcaccgggaagtgttcggcgacgttccggcaaaggccgaggctggggccgaggctgggggcggggccgggcctggggcagaggacgaggccgggcgcagtgcgagaccccgcaaacaagcgcatcagaggatctgggtggtgcgagagcctcctacagcagccaggtacacacaaggcctcagtttttccatctgtgaaatgggtacgtggacagacctgtccagtagcctcccatgtgagaatcctcggactgagaggcgggggtccgatcggcatcaaggattcacccactcccagagccttcgggatcagccccaccccatcagcaggacacagcccatgccactggaaatctcgcgagaatcccgcgctgaagcgaagtcgagacgtttgaccttcctccgtttccgtagttccgagttgcggtttctccgcctgggcagcatggccgtattccggtcgggtctcctggtgctgacgacgccgctggcctccctagcccctcgcctggcctccatcctgacctcggcggcccggctggtgaatcacacactctatgttcacctgcagccgggcatgagcctggagggcccggctcagccccagtacagccccgtgcaggccacgtttgaggttcttgatttcatcacgcacctctatgctggcgccgacgtccacaggcacttggacgtcagaatcctactgaccaatatccgaaccaagagcacctttctccctcccctgcccacctcagtccagaatctcgcccacccgccagaagtcgtgttgacagatttccagaccctggatggaagccagtacaacccggtcaaacagcagctagtgcgttacgccaccagctgttacagctgttgtccgcgactggcctcggtgctgctatactccgattatgggataggagaagtgcccgtggagcccctggatgtccccttaccctccacgatcaggccagcttcccccgtggccgggtctccaaagcagccggtgcgtggctactaccgtggcgctgtcggtggcacgtttgaccgcctgcacaacgcccacaaggtgttgctcagtgtcgcgtgcatcctggcccaggagcagcttgtggtgggagtagcagacaaagatctgttgaagagcaagttgctccctgagctgctccaaccttatacagaacgtgtggaacatctgagtgaattcctggtggacatcaagccctccttgacttttgatgtcatccccctgctggacccctatgggcccgctggctctgacccctccctggagttcctggtggtcagcgaggagacctatcgtggggggatggccatcaaccgcttccgccttgagaatgacctggaggaacttgctttgtaccagatccagctgctgaaggacctcagacatacggagaatgaagaggacaaagtcagctcctccagcttccgccagcgaatgttggggaacctgcttcggcctccatatgaaaggccagagctccccacatgtctctatgtaattgggctgactggcatcagtggctctgggaagagctcaatagctcagcgactgaagggcctgggggcgtttgtcattgacagtgaccacctgggtcatcgggcctatgccccaggtggccctgcctaccagcctgtggtggaggcctttggaacagatattctccataaagatggcatcatcaacaggaaggtcctaggcagccgggtgtttgggaataagaagcagctgaagatactcacggacattatgtggccaattatcgcaaagctggcccgagaggagatggatcgggctgtggctgagggaaagcgtgtgtgtgtgattgatgccgctgtgttgcttgaagccggctggcagaacctggtccatgaggtgtggactgctgtcatcccagagactgaggctgtaagacgcattgtggagagggatggcctcagtgaagccgcggctcaaagccggctgcagagccagatgagcgggcagcagcttgtggaacagagccacgtggtgctcagcaccttgtgggagccgcatatcacccaacgccagagcttgcagcctggtggggtcggacgatgtggctgggggcttctctgcccggttcctgacacaccggccagcagtgcaggtccggtggagtatgcctacagcgacaacagcctggaccccgggcttttacccgcaaggggagtgtagtgtccagagctaatagcatcggttccaccagtgcctcttctgtccccaacacagatgatgaggacagtgattaccaccaggaggcctacaaggagtcctacaaagaccggcggcggcgcgcacacactcaggctgagcagaagaggagggacgccatcaagagaggctatgatgaccttcagaccatcgtccccacttgccagcagcaggacttctccattggctcccaaaagctcagcaaagccatcgttctacaaaagagtatggctagggaaagcactggaggggatggagccaagaggggctgtgaagaggccagtgcctcctacccacccatggctcggccttggtgtggtgattgccatgggatagttggggtctgggccattgactacattcagtttttgcacaaggagaagaaaaagcaggaggaggaggtgtccacgttacgcaaggatgtcaccgccctaaagatcatgaaagtgaactatgagcagattgtgaaggcacaccgggacaacccccatgaaggggaggaccaggtctctgaccaggtcaagttcaacgtgtttcaaggcatcatggattccctgttccagtccttcaatgcctccatctcagtggccagcttccaggagctgtcagcgtgtgtcttcagctggatcgaggagcactgtaagcctcagaccctgcgggagattgtgattggcgtcctgcaccaattgaaaaaccagctttactgaccggttcttggaaacctggagaacagccaacaagaggcccttgaatctctacgtggccactgaactgctgggcccgggagactggactacaacacctcacactggtcagctggtttctacttggtgtttggtttttcccagccccattttatcttcagcggagccgcggtgtttgttttgtgaaagcttctgattaatttattatattgacgataaaactcaaaaaaaaaaa

SEQ ID NO: 106 - DNA, 4057 bp, Homo sapiens
  CDS (1)..(3138)
atggcccgcaccgtggtgctcatcaccggctgttcctcgggcatcggcctgcacttggccgtacgtctggcttcagatccatcccagagcttcaaagtgtatgccacgttgagggacctgaaaacacagggccggctgtgggaggcggcccgggccctggcatgccctccgggatccctggagacgttgcagctggacgtaagggactcaaaatccgtggccgctgcccgggaacgcgtgactgagggccgcgtggacgtgctggtgtgtaacgcaggcctgggcctgctggggccgctggaggcgctgggggaggacgccgtggcctctgtgctggacgtgaatgtagtagggactgtgcggatgctgcaggccttcctgccagacatgaagaggcgcggttcgggacgcgtgttggtgaccgggagcgtgggaggattgatggggctgcctttcaatgacgtttattgcgccagcaagttcgcgctcgaaggcttatgcgagagtctggcggttctgctgctgccctttggggtccacagcttgagcctgatcgagtgcggcccagtgcacaccgccttcatggagaaggtgttgggcagcccagaggaggtgctggaccgcacggacatccacaccttccaccgcttctaccaatacctcgcccacagcaagcaagtctttcgcgaggcggcgcagaaccctgaggaggtggcggaggtcttcctcaccgctttgcgcgccccgaagccgaccctgcgctacttcaccaccgagcgcttcctgcccctgctgcggatgcgcctggacgaccccagcggctccaactacgtcaccgccatgcaccgggaagtgttcggcgacgttccggcaaaggccgaggctggggccgaggctgggggcggggccgggcctggggcagaggacgaggccgggcgcagtgcgagaccccgcaaacaagcgcatcagaggatctgggtggtgcgagagcctcctacagcagccaggtacacacaaggcctcagtttttccatctgtgaaatgggtacgtggacagacctgtccagtagcctcccatgtgagaatcctcggactgagaggcgggggtccgatcggcatcaaggattcacccactcccagagccttcgggatcagccccaccccatcagcaggacacagcccatgccactggaaatctcgcgagaatcccgcgctgaagcgaagtcgagacgtttgaccttcctccgtttccgtagttccgagttgcggtttctccgcctgggcagcatggccgtattccggtcgggtctcctggtgctgacgacgccgctggcctccctagcccctcgcctggcctccatcctgacctcggcggcccggctggtgaatcacacactctatgttcacctgcagccgggcatgagcctggagggcccggctcagccccagtacagccccgtgcaggccacgtttgaggttcttgatttcatcacgcacctctatgctggcgccgacgtccacaggcacttggacgtcagaatcctactgaccaatatccgaaccaagagcacctttctccctcccctgcccacctcagtccagaatctcgcccacccgccagaagtcgtgttgacagatttccagaccctggatggaagccagtacaacccggtcaaacagcagctagtgcgttacgccaccagctgttacagctgttgtccgcgactggcctcggtgctgctatactccgattatgggataggagaagtgcccgtggagcccctggatgtccccttaccctccacgatcaggccagcttcccccgtggccgggtctccaaagcagccggtgcgtggctactaccgtggcgctgtcggtggcacgtttgaccgcctgcacaacgcccacaaggtgttgctcagtgtcgcgtgcatcctggcccaggagcagcttgtggtgggagtagcagacaaagatctgttgaagagcaagttgctccctgagctgctccaaccttatacagaacgtgtggaacatctgagtgaattcctggtggacatcaagccctccttgacttttgatgtcatccccctgctggacccctatgggcccgctggctctgacccctccctggagttcctggtggtcagcgaggagacctatcgtggggggatggccatcaaccgcttccgccttgagaatgacctggaggaacttgctttgtaccagatccagctgctgaaggacctcagacatacggagaatgaagaggacaaagtcagctcctccagcttccgccagcgaatgttggggaacctgcttcggcctccatatgaaaggccagagctccccacatgtctctatgtaattgggctgactggcatcagtggctctgggaagagctcaatagctcagcgactgaagggcctgggggcgtttgtcattgacagtgaccacctgggtcatcgggcctatgccccaggtggccctgcctaccagcctgtggtggaggcctttggaacagatattctccataaagatggcatcatcaacaggaaggtcctaggcagccgggtgtttgggaataagaagcagctgaagatactcacggacattatgtggccaattatcgcaaagctggcccgagaggagatggatcgggctgtggctgagggaaagcgtgtgtgtgtgattgatgccgctgtgttgcttgaagccggctggcagaacctggtccatgaggtgtggactgctgtcatcccagagactgaggctgtaagacgcattgtggagagggatggcctcagtgaagccgcggctcaaagccggctgcagagccagatgagcgggcagcagcttgtggaacagagccacgtggtgctcagcaccttgtgggagccgcatatcacccaacgccagagcttgcagcctggtggggtcggacgatgtggctgggggcttctctgcccggttcctgacacaccggccagcagtgcaggtccggtggagtatgcctacagcgacaacagcctggaccccgggctttttgtagaaagcacccgcaaggggagtgtagtgtccagagctaatagcatcggttccaccagtgcctcttctgtccccaacactgagcgtagatgatgaggacagtgattaccaccaggaggcctacaaggagtcctacaaagaccggcggcggcgcgcacacactcaggctgagcagaagaggagggacgccatcaagagaggctatgatgaccttcagaccatcgtccccacttgccagcagcaggacttctccattggctcccaaaagctcagcaaagccatcgttctacaaaagagtatggctagggaaagcactggaggggatggagccaagaggggctgtgaagaggccagtgcctcctacccacccatggctcggccttggtgtggtgattgccatgggatagttggggtctgggccattgactacattcagtttttgcacaaggagaagaaaaagcaggaggaggaggtgtccacgttacgcaaggatgtcaccgccctaaagatcatgaaagtgaactatgagcagattgtgaaggcacaccgggacaacccccatgaaggggaggaccaggtctctgaccaggtcaagttcaacgtgtttcaaggcatcatggattccctgttccagtccttcaatgcctccatctcagtggccagcttccaggagctgtcagcgtgtgtcttcagctggatcgaggagcactgtaagcctcagaccctgcgggagattgtgattggcgtcctgcaccaattgaaaaaccagctttactgaccggttcttggaaacctggagaacagccaacaagaggcccttgaatctctacgtggccactgaactgctgggcccgggagactggactacaacacctcacactggtcagctggtttctacttggtgtttggtttttcccagccccattttatcttcagcggagccgcggtgtttgttttgtgaaagcttctgattaatttattatattgacgataaaactcaaaaaaaaaa

SEQ ID NO: 107 - DNA, 3214 bp, Homo sapiens
  CDS (1)..(879)
atgcggctgcacagacttcacgcgcggccgagcgcggtggcctgtgggctcctgctgcttctcctccagggtcactatgaggctcccgcggagggcctgtgctgccggccggtaataacagtaatagcttctggcagcagctggctctcaatgtgtggcgtccttggccaagggggcgcgctgagccctccaaaggggcctcagacaagcatgatgagaaagcctgcctgttttgatggttccaagcttggaaagtttgggaaagaatccaagaacatggcaggttatcaaggcgttatcagctgggacacaaaaggagagaagggcgggaagatgccgcgcgtcgtgcccgaccagagaagcaagttcgagaacgaggagttttttaggaagctgagccgcgagtgtgagattaagtacacgggcttcagggaccggccccacgaggaacgccaggcacgcttccagaacgcctgccgcgacggccgctcggaaatcgcttttgtggccacaggaaccaatctgtctctccagttttttccggccagctggcagggagaacagcgacaaacacctagccgagagtatgtcgacttagaaagagaagcaggcaaggtatatttgaaggctcccatgattctgaatggagtctgtgttatctggaaaggctggattgatctccaaagactggatggtatgggctgtctggagtttgatgaggagcgagcccagcaggaggatgcattagcacaacaggcctttgaagaggctcggagaaggacacgcgaatttgaagatagagacaggtctcatcgggaggaaatggaggtgagagtttcacagctgctggcagtaactggcaagaagacaacaagaccctagtcctggttccaatttaggtggtggtgatgacctcaaacttcgttaattaatagcacagcagatgtgtgctgcccatctttacatacacattgcttctagttggcagaaataattgattaaaagaccagaaactgtgataactggaggtactacggtctatttctcaaccttaggcagtaatagacatcacaaactgccatggttttgcactatgattataatacctgcatttctaattttttaagcatgtagccagtaataatttgaagttttttttctatgcaagcttaccttgttggcattattttagggagttgaaactatcaactgtaaagctccttttcttccactttaatttaaaagttcatgtcatttaaaaacaagtcaagaaattaaaattgtatcagagggttttctctaatcattttttctatttttttttttgtacttctagatgttttggttatacagcttcattttagatgagcattcttattttttgttttgtttgccccatttccttttgtgtttttatagtctatagcattttaaaactgctgatgttgtttgcattatttacaggctaaaaacttagtagcatagagctgtctgccacagccttctgacaaagtttacagttattaaagttgcagtatccttttaaatgctagtaatcagcactcttttttttttttttttttaatagagacagggtctcgcagtgttgcccaggctggtctcgaactcctggcatcaagcgatcctcctgccttagcctcccagagtactgggattacaggctctttctttttaaacataaaagttttaaattggtattaactctgtactctgccctagattgttttagcttctgttctgtaatcatgagtttggttggagatattctccatagatgatcttctactgaaatgcctaaagaagtcacaggctggcttctgttttattcagggatttttttaaaaagtcaatcagaaaagggatactggagcttcttcatgtatgtaacagcatattaaactggagacagtgatgaatcagctacaaaggtaatattgtattaaaatcatgtttaagatagctgcttttatgtgtattttatattgcatgcttttgtaaaaacatgctgggtgatgaaagattagttttagagagaaaatgttcatctgtgcagaggatgcattttcttccattaattctggaaaaaacgttcacagttatatatatggtattttgcaaaaggactattaatagaaccttttgagatgaattaatgtaagaatattttttaaataggcttactgtcaaattgcaactttttttttagatacagagtggaaaacagtgctaagtcatttggcacctccttacaaatatttttcatggtcacatttattaaatgttactacatttctgaatttttgaaaaatgtattttatcattaaatggcattattttaaagggtgaaaaactgacacagtcaattcagaaaatggactgaagtctgaataaggtcattgcatttaaaaagcatataactgtacttgactgatgagggaggtgttactttcattgtatataggtcttatttcataaacagatatcctgtatcaaataaaagtatttgttatatatttgaagttatgcatggaaaggagtgtgtttaaattgttacaaacaataatgcgtcattaaaggccatgctgatcttgcataactataagtactatgaatgaatttggttggttttggtgttgtacagctcacatgtttacacactcagtgccctaatttcccctgagggaatcgctttttaagtgatccttacagtggtgttttatgttactttattacagagctccttggttttttacttctgcacttaaatttttttaaataacatgatgatggtacattttcctctattgtctagctaagggctttcggtccaccagtaaataagatcaaatgctcttaaatgttcctgttaccatcctaatgtaaatactggatttttctgtcatttagcaccatgctgcttctgtctgtcttaatgctggcattaagatcatgagccctttttctccagtagtacaggctttgaaaactacttctattaagttattgatgcaatttgatattttttcataatctatatttaaacaaaattacatcattgcatcatcttttctaaattcatctccattaaaacttgccttaagctaccagattgcttttgccaccattggccatactgtgtgtttgtttgtttaatttactttcacaataaacttctgtgtagtaaaaaaaaaaa

SEQ ID NO: 108 - DNA, 447 bp, Homo sapiens
  CDS (139)..(303)
ggcgccgagctttacgctgggctccctgctgcggacgttcaagcgggtcaggcctctacttttatctacaccgctacccctcaccgctgagggtcataacgcacgggtcccccacggctctgccacctgtagtgctcgatggttccttcatcagcttcaggccaagttcgaagtcactatgtagactggagaatgtggcgcgatgtgaagagacgaaaaatggcctatgaatacgcagatgagaggctacgtattaattcactcaggaagaataccattttgccaaaaattcttcaggttagctaattaagatgagtccctttgtaccacaagatcattaactcaacatcagatcacttttgatactgtttgttgtgacttggtatcaatataatttctggagaataagatccacatcaatataaacaaatagtctttgaactgagg

SEQ ID NO: 109 - DNA, 2005 bp, Homo sapiens
  CDS (224)..(1933)
gtgtctcgtgcctctgctggaccctgactctgggctcctggtcctggcaggaaaggggttcagtcagcaaacggggctcagttcagactcatttcagggcgagaggcagctgtactgttacgaggtggtcccgcagcagccggcgctgagcccagtgacccagtgtgtcctggagagcgtgctgcgtggggctgcccttgtgccccggcaggcgctggccgtcatgagctgcgaggtactccgcgtcctacagctgagcgacacagccatcgtgcccatcggctaccatgtgccccgcaaggctgtggagttccacgaggacctgttcccggacactgccggctgtgtgcctgccaccgacccccatagctggtgggctggggacaaccagcaggtgcagaaggtcagcctcaaccccgcctgccggccccacccgagcttcacttcctgtctggtgccccctgcggagcccctccctgacacagcccagcctgcggtgatggagacacccgtgggtgatgcagacgcaagccctggggccctcactctccagcaccagtggcatcgggaccagccccagtttgaggtcgctgcagagcctgctggttccaagttccgccatgctcagggcactgtcctgcaccgagacagccacatcaccaacctcaaggggctcaacctcaccacacctggtgagagtgacggcttctgtgccaacaagctgcgtgtggccgtgccgctgctcagcagcgggggacaggtggctgtgcttgagctacggaagcctggccgcctgcccgacacggcactgcccacgctgcagaatggggcagctgtgactgatctggcctgggacccctttgacccccatcgcctcgctgtggctggtgaggacgccaggatccgactgtggcgggtacccgcagagggcctggaagaggtgctcaccacgccagagactgtgctcacaggccacacggagaagatctgctccctgcgcttccacccactggcagccaatgtgctggcctcgtcctcctatgacctcactgttcgcatctgggaccttcaggctggagctgatcggctgaagctgcagggccaccaagaccagatcttcagcctggcctggagtcctgatgggcagcagctggccactgtctgcaaggatgggcgtgtgcgggtctacaggccccggagtggccctgagcccctgcaggaaggcccagggcccaagggaggacgcggagctcgcattgtctgggtatgtgatggtcgctgtctgctggtgtctggctttgacagccaaagtgagcgccagctgctcctatatgaagctgaggccctggccggcggacccttggcagtgttgggcctggacgtggctccctcaaccctgctgcccagctacgacccagacactggcctggtgctcctgaccggcaagggcgacacccgtgtattcctgtacgagctgctccccgagtcccctttcttcctggagtgcaacagcttcacgtcgcctgacccccacaagggcctcgtcctcctgcctaagacggagtgcgacgtgcgggaagtggagctgatgcggtgcctgcggctgcgtcagtcctccctggagcctgtggccttccggctgccccgagtccggaaagagttcttccaggatgacgtgttcccagacacggctgtgatctgggagcctgtgctcagtgccgaggcctggctgcaaggcgctaatgggcagccctggcttctcagcctgcagcctcctgacatgagcccaggtgcaccgagggactgggtgtggggaggaagcgggatgggggttggagaaagggacagaaggcccaggttgaagttccattcctgttggcacgcagaatcctctggcctttgggagggtggagtggctgtgtcaatcagtctctgagccagtggagggcagggctcgtggtctgtgttttcatcacaggtccccaccccccccaaaaaaaaaaaa

SEQ ID NO: 110 - DNA, 740 bp, Homo sapiens
  CDS (191)..(466)
cggccgcgtcgacggagagtgtcatggaggcctacgagcaggtccaaaagggacccctgaagctgaaaggcgtcgcaaagctgggagtgaccaagcggtgaggcccgagggcccgcgggattccgtcttcatcccccttagaccttttctcgggacccctggccctgatcctccgacccgccgcctcctcatgtctttttccaggaagaagaaaaagaaggacaaagacaaagcgaaactcctggaagcaatgggaacgagcaaaaagaacgaggaggagaagcggcgcggcctggacaagcggaccccggcccaggcggccttcgagaaaatgcaggagaagcggcaaatggaaaggatcctaaagaaggcatccaaaacccacaagcagagagtggaggacttcaacagacacctggacacactcacggagcattacgacattcccaaagtcagctggacgaagtagccgcctgcccccagtatggagcagcatcgagggttcgcaaaaggccacactggggttgtgtgtgtttcctttggtatattctggaaacatggctacacacacccttgcatcttctgctacagactgcttttcgaagctgtgtaccctcattctggaacttgattaaagtaagatcgtccttgtactcagtttaggcttcttggcaacatacagaagatacacccttttcgtttggatggaaagtttctaagtttatccagaggtaaagcct

SEQ ID NO: 111 - DNA, 792 bp, Homo sapiens
  CDS (18)..(749)
  misc_feature (1)...(792): n = a,t,c or g
ctcagagctggtctgccatggacatcctggtcccactcctgcagctgctggtgctgcttcttaccctgcccctgcacctcatggctctgctgggctgctggcagcccctgtgcaaaagctacttcccctacctgatggccgtgctgactcccaagagcaaccgcaagatggagagcaagaaacgggagctcttcagccagataaaggggcttacaggagcctccgggaaagtggccctactggagctgggctgcggaaccggagccaactttcagttctacccaccgggctgcagggtcacctgcctagacccaaatccccactttgagaagttcctgacaaagagcatggctgagaacaggcacctccaatatgagcggtttgtggtggctcctggagaggacatgagacagctggctgatggctccatggatgtggtggtctgcactctggtgctgtgctctgtgcagagcccaaggaaggtcctgcaggaggtccggagagtactgagaccgggaggtgtgctctttttctgggagcatgtggcagaaccatatggaagctgggccttcatgtggcagcaagttttcgagcccacctggaaacacattggggatggctgctgcctcaccagagagacctggaaggatcttgagaacgcccagttctccgaaatccaaatggaacgacagccccctcccttgaagtggctacctgatgggcaccacatcatgggaaaggctgtcaaataatcgacagcgaagtcgacgnnnnaattccggagcggtcgcg

SEQ ID NO: 112 - DNA, 2295 bp, Homo sapiens
  CDS (1)..(2292)
atgacatgtctccgcaccggcaccgagggggcgcagggcggcgtggggagggggacccaggccgggggtccgggtggcgcgccctctctcacccccgaggcggcaggagcagcgcggcgcgaggacacctccgggccgtcggtgcccctgagcttcccggcggcgcgctgccccaggaaagttcccggcctgccgcccctcgggctgttggaaagtttcggcggctgcagggccctggcagctaggcgccaagcgtcgcgcggggcgggcacggctgcggggtcgggccgcgctcggctggagtgctcagtgcaagacgcccggacgggcccagcgcgcaacccgagaccccgggccagccctcccgccctcacgcggcccgtgcgcaaagcggaccgggccggcgacgcgaatctccgccccgccccatctgacagcaaattttcccattggtcgagagacccggcgcggcacggcaaccggcgccgattgggcggatgcgcggagatgacggcttgccattgggcctccgggatgtcagtcccggcggatgaccggccccctcgcggaggggccgcggccccgcacctgcccgaacctctgcggcggcggtggcagggtacgcgggaccgctccctcccagccgacttacgagaacatcccccgaccatccagccccgagcagggactggcagagccggcgccccttccccggactctggccgcgtagcctccgccaccactcccagttcacaggtatccttcttcagcgcctgctactcgctgcgcgctgcgcgccgctccctcctgtcgacatcgaattgtattcttcacgcaagccgcgagagagagttctgctgctatccccattttacagttgggaaacagcctcagagaggttctcacttgcttgaacacagtcgtctgaccctggggcctgggggctctctcatcctcacgcccctgggtccccgcagcggggagacgatggagggagccgcggagtccccgaaggccgctggatcaggaagcgctcagacgcccgcgcagcccgaagctttggcgcagccccgggggcggggcgccaggaggtggcagcctccgagcgacagcgcgcccagccaacgggacgccggcatgcggcgcgccgccccgcccctcgctgcgcggcccaatggtgaacgcgccggcttcgggctgggcggtactgggctggctgcggtggcgcgcgggcgcggcacccggaagtcggcggcggtggcggaggcgacctcgcgacctgtgtcagcagagccgccctgcaccaccatgtgcatcatcttctttaagtttgatcctcgccctgtttccaaaaacgcgtacaggctcatcttggcagccaacagggatgaattctacagccgaccctccaagttagctgacttctgggggaacaacaacgagatcctcagtgggctggacatggaggaaggcaaggaaggaggcacatggctgggcatcagcacacgtggcaagctggcagcactcaccaactacctgcagccgcagctggactggcaggcacgagggcgaggtgaacttgtcacccactttctgaccactgacgtggacagcttgtcctacctgaagaaggtctctatggagggccatctgtacaatggcttcaacctcatagcagccgacctgagcacagcaaagggagacgtcatttgctactatgggaaccgaggggagcctgatcctatcgttttgacgccaggcacctacgggctgagcaacgcgctgctggagactccctggaggaagctgtgctttgggaagcagctcttcctggaggctgtggaacggagccaggcgctgcccaaggatgtgctcatcgccagcctcctggatgtgctcaacaatgaagaggcgcagctgccagacccggccatcgaggaccagggtggggagtacgtgcagcccatgctgagcaagtacgcggctgtgtgcgtgcgctgccctggctacggcaccaggtattgcagcaccgtgggtgcgccacctcctatcccatgtcccacctcccacgctagagggccggcaaagaagccaagtgcccatagccagagccaggcttcttcctcgcctgagtggattccagagcttctgccctgtccagacgcagctgcaggaaccaacactatcatcctggtagatgcggacggccacgtgaccttcactgagcgtagcatgatggacaaggacctctcccactgggagaccagaacctatgagttcacactgcagagctaa

SEQ ID NO: 113 - DNA, 2411 bp, Homo sapiens
  CDS (124)..(1110)
tggaggttaaaaaaattacagaaatccttacctgtgttactgagtagcaatactatttattatgtatgtattttaaaggcattaacattttttatttttcaggattaattggaattcttcaaaatgtcaggtgtggtacccacagcccctgaacagcctgcaggtgaaatggaaaatcaaacaaaaccaccagatccaaggcctgatgctcctcctgaatacaattctcattttttaccaagaccccctggaacagctgtccctccacctactggctacccaggaggcttgcctatgggatactacagtccacagcaacccagtaccttccctttgtaccagccagttggtggtatccatcctgtccggtatcagcctggcaaatatcctatgccaaatcagtctgttccaataacatggatgccagggccaactcctatggcaaactgccctcctggtctggaatacttagttcagttggacaacatacatgttcttcagcattttgagcctctggaaatgatgacatgttttgaaactaataatagatatgatattaaaaacaactcagaccagatggtttacgttgtaaccgaagacacagatgactttaccaggaatgcctatcggacactaaggcccttcgtcctccgggtcactgattgtatgggccgagaaatcatgacaatgcagagacccttcagatgcacctgctgttgcttctgttgcccctctgccagacaagagctggaggtgcagtgtcctcctggtgtcaccattggctttgttgcggaacattggaacctgtgcagggcggtgtacagcatccaaaatgagaagaaagaaaatgtgatgagagttcgtgggccatgctcaacctatggctgtggttcagattctgtttttgaggtcaaatcccttgatggcatatccaacatcggcagtattatccggaagtggaatggtttgttatcagcaatggcagatgctgaccattttgacattcacttcccactagacctggatgtgaagatgaaagccatgatttttggagcttgcttcctcattgacttcatgtattttgaaagatctccaccacaacgttcaagatagagagacacagcaagccatcacctatggttaattttgaaaaatggaaaagttggattgggcttacagtcagcactcagttatttgcaagtgtatttctttgctttgtagagtatttttattgggtgttaactttgacagctgagagtgggcttgcaagaacacaatctaaaagtgtgtttcaattgagtatctctctagtagaataggagttcatcctgaaaagctgtgactcattaacccagtaaacatatacaaagtaagcttaaagcactataaacatgagataagggaaaatgaatccagagttctcatattaataggtagtgaaacaataaggctttttagagcagactttgttggcataaaataacctggcttctatccctaaccctttcctacctttcctctccgtcaacatgtcctcatactgaagacaaacttgtttcaatgatagtcttcattttcaaaaacaaaaaggcaggcagacagaaataatgatgttttcttgcactaagaaggtactacttgtacacatatatcaaaacctcattctgcaaagtttttgaaggtttcaatgggaaatttgattttattacaaaataaaacattttttaatgttaaagtttatatattccatgcttgttttctcattcactggcatggatgatcaggagctgcctatatgtgaaggcagaatcagactatcaggaaaggagctggccagggccacagccagtcaagatctctgagcaacttagagacattggtgtcattatatgaagcttgcatttaatacatttatacataatacatttgtacatttaattcataacgtctcttggtcacagatgccttatatataaaataagttgccagatctctaagattgcctagtacacctttgtatctcatttgatgtgatacccagaagagatcattgttttttgtttttgtttttgtttttttcaagaagatccttcgtgatcaccatgctgttctcatggtaagaactggagttatgtttttaaatttggaaatatgacattttatgtagcactttataaaaagtgaaagcgacaaattccaccgctgcttaatactgctttgcttctttttattgacatgatagataaatatgtatctacacagagtaataataataaaacacagtaaacattctatttctctatggtctacagcatgccagtaaataatatgtaggaccaataataaattatcaattacacatttttgtgttaactaattaaaagcatagtgtataagtgaaaaaaaaaaaa

SEQ ID NO: 114 - DNA, 2367 bp, Homo sapiens
  CDS (1729)..(2085)
ttagtccacaggtcgcttttccccatatttctttgtaaactcttcagcattcttacagaattttttacggtccttagagtattcttcagctaggtcagcccgaagcgggtgctcaggctgggggtcattcaccagtgctatgagggactggattacagggtggagcgccgtgtcctccaccgacgtcaatgacgtgctgaggttcacccattcattcacctgcgaatgctgcaccgactggggaccgggctcctcactgttcttggaaaagttcagcttgatcagggacctcccgtccagcttctctccattgctggggttggtcccgtacttcttaagccatggaacaatgttcagtaagtcaaagacgatgccatcgggagtgcagactggcttcttgccaccataaaagtgagtgtattcagcacaggtaatgtacattttgtccttttggtgctgtcgcttccccatggcggagcggcggcggcgaaattgagacctgttgctgttgggcccggagttggccatgctgaggatgccgcggcccgtgtgcgagaggttgggccggaactcgtctttgaagggcttcccccagtatgactccccacccgtgcctgtgcctgtggggtcgcccccttggatcacaaagttccggatggatctgtggaagatggtgccatcgtaataatgcttcttgcaaagcctgatgaagttttcgcaggtttttggtgtctgtgcgcaggccatgctgccaacgcggccccctaggaaggacacagggcactgctgcgggtcccgcctagtgacaggctgaatttccagtggcagccctatatttaagacatggctgtcagatgacccagagatgaccttggggcatggggagtggctggcctccacacccaccaggtcgcagtgcagctccaggttgaggtcgcccttgttggtgtgcagccgcacgtagcccttcttcttcacaaactggtagcgcagcacatcctcgtcgatggcagctgcttcatgtgtggtctccgggaccatcgcggtggaggtgaaggaagcgctgaccttccctgtggaatagtgggcagcattcagcttgtccactttcttcttctccggggccttcatggtggctgccagaatctcgtcccctttgaactccttgtagagctcctgcagggtctctcgggtctcggcatttgtatttttcagataataagacgggtcctgtttggccttctcttcatctgggtctattattttcatgttattcttcacatgatagaagttagagacattgaacttgtccaaattggtggggtcctggagggtgatgatgtcctgccgggagaagggctcgtcggtcagcaggtcccggaagttcttggccttgatatttagctgttccactgcctcataggcgtagacgttgccggtcgtcctcacagccacgatgtgggtgttgttggtgaacacggtaaacagcactgggcagtggtacttccctgcttcacacgcatgttctctctgtaacccaccactttgtctgattggttggcaggttacgtttttctctcgtcccagctgtgtggacagtgccacacgccctcctggacaacgacggctcttgcgtgcattttccagtgttgcttttgtcagagaggccagcagagccacggttcttccagaaccagccctgagctgagtgaggagtgcccaggagagatggtgaaaatgacaaagtccaaaactttccaagcgtatctgccgaactgtcaccgaacgtacagctgtatccactgcagagcacacctggccaatcatgacgagctcatctccaagtcctttcaggggagccagggacgcgcctacctcttcaattccgtggtgaacgtgggctgcggccctgcagaggagagggtccttctcaccgggctgcatgcggttgccgacatctactgcgagaactgcaagaccacgctcgggtggaaatacgagcatgcctttgagagcagtcagaaatataaggaaggaaaattcatcattgagcttgctcatatgatcaaagacaatggctgggagtaatgtgcgaactttcccttctccttcgaatgctgttttgtgaaagaaactgtgaatgtaatggaaacgtaggagcatctggtgacagcctttcttgccctctgacctcaaaggctagctgcgcatagctcttgacactctcggccatctctgtgggtaaggtgtccctcggatctgtcctcttcgtgtacacagttgtttctgaaaattttcaatgagctttttctaacttctcaagttctagagaaagaattaaccaactgatgacttaaaaaaaaaaaa

SEQ ID NO: 115 - DNA, 9870 bp, Homo sapiens
  CDS (3442)..(9387)
atggcacgatcacagctcactgtagtcttgacctcctgggctcaggcgattctcctgcttcagcctctcgaggagctgggcccacaggaactgggtggcatagcaggaggtgagcagcaggcaagccagcattacccgctgagctccgcttcctgtcagatcagaggcaacgctgattctcataggagcacggatcctactgtgaacagcccatgcgaaggatctaggttgtgcggcactcccaagaatctaacgcctgatgatgttcacttatgtagttcccatttgttacttcgacgagcagctgtggcatgtcttcggcaacttgcacaaagagaagcagcggaagtatgtgaatatgccatgagcctggcaaaaaatacaggggacaaagagagcagtagtgccaatgtcagtccttttgcccctggggttagttctcgaactgatatccattgccggcaccaaggtgttaatataacagaaactggtcttgagggacttctttttggaatgctagaccgggagacagatcgaaaattatgttctgatattcatgacactttgggacatatgctttcttcgctggcagtagaaaaactttctcattggctaatgctttgtaaagatgtcctggcagcttctagtgatatgagtactgcaactctcttaagtagtggaaaagatgaagaagctgaaaagaaagatgagatggatgatgataccatgtttaccacgttaggtgaagaagataaatcaaagccctttgtggcccctcgctgggccactcgagtatttgctgccgattgcctgtgtcgaatcatcaatttgtgtgagaatgcagaccaggctcactttgatcttgccttggcacgttctgctaaacttcgaaaccctacaaatgacctcttggtacttcatctctctgacctcattcgcatggcattcatggctgcaactgatcatagcaaccagctgcgaatggctgggctccaggcgcttgaagacattatcaagaagtttgcgtctgtgcctgagccagaatttccaggtcatgtgatactggagcagtatcaggctaatgtgggagctgctctaagaccagccttttcacaagatacaccatcagatataatagcgaaagcttgccaggtatgtagtacatggataggaagtggagttgtcagtgatctcaatgatctccgtcgagtacacaatcttcttgtttcttctctggacaaagttcaggctggaaaaggatcttccagccagctgtaccgagagagtgccacgaccatggaaaaactggctgttctcaaagcttgggcagaggtatatgtggtcgctatgaatattaaaaaggaagcagagtcaaaaccaaaaagagcaattaaaaatactgacgatgatgatgacgactgtggtaccatcgatgaactgccaccagatagtttaataacactggtacaacctgaactaccaacactcagtcgcctgtggttagcagcattaaaagattatgcactcttgactttaccagccgaattttctagtcagcttcctccagatgcaaggagtgatgaggaagtcctcagtgttagtagaggaaacaacaggaggtggagaggaatagcagaagaagaaagaaacagagggaagaaacagagttccctggttgtgatagaaagagaagatgatagggttttaggagccactggcaacaatgaagaggtaaattctgtgacaacaggacctgaggagcccattgaacatgttacagcatgcctgcaggccttacataccttgctagactccccttatgctcgagtccatattgcagaagatcagctgataggtgttgagttgctgagtgttttgcaccgccttctattgacctggaatccatcatctgtccagctgttggttactggagttgtacaacagatagtaagagctgctcaggattatttgcaagagaaaagaaacactctaaatgaagatgatatggaaaaagaggcctgtaccgtattgggagaaggaggtgacagcggtggtctcattcctggaaaatctcttgtgtttgcaactatggagctgctgatgttcattttagtacggcatatgccacatctcagtaccaaggtgtcagactctccaagtcacatagccactaaaactcgactatcagaagaaagtgctcgtttggtggcagccacagttaccatactctctgatttaccatccctttgttcacccgctgagttaccctacatatgtgaaaataatgaattctccatatttggagttttgcaagcagaggctacaatggctgcaggtcagagtggtgaaggatgtatgacaatcctgcccacaattctgttcttaattgcaagaatattgaaagacacagcaataaagtctgcagataatcaggttcctccaccagtcagtgcagctcttcaagggattaaaagtattgtgacactttcaatggccaaaactgaggctggcgttcaaaaacagtggacagctctgattcgtagcacgcttgcttgcatcctggaatattctcaaccagaagactctgtacctacacctgatgaagtaagcatgctaacagcaattgcactcttcctgtggtctgctagtaatgaaataataggagtccagtcattacagaatggctgcatgaacagatttaaaaatgcattaaattcatgcgacccatgggttcaagccaaatgttaccagcttctcctctcagtcttccagcattccaatcgtgccctttcaactccttatattcattcattagctccaatagtggttgaaaagctaaaagctgttgaaagaaacagaccagccagtaacatagagcttttagcggttcaagaaggaataaaagttcttgaaacactggttgctcttggtgaagaacaaaacagagtccagctacttgctcttttagttcccactttgatatcttacctgctggatgaaaattcttttgcctcagcaagttcagcttccaaagatcttcatgagtttgcactccagaatttaatgcatattggacctctgtatccacatgctttcaagacagtaatgggggctgctcctgagttgaaaaggtttccactggttacttggtgtgcgccctatgtaaatgaagaggatgaagtaaagttacaacgtcatttagttggtgtgcgccctatgatttactgcaggaggactgcaaagggaaagaaacttcaacggagcagtttttcagatgggctgtcaacaaaccacaatttggaagcagcagcagaaagctgcggcgttgtcttagaaaggtgatcggcgttccttagaaatgaaaactggtcaggtaacaggtttgagcccctcgagtcaaaagagaaaggcaagagcgacagcgactcgcagattggcagaatggaggagcgtctagggaggctgctccctgctgactggggtgtgggcgggacggcggagggaggaggaggcgctgcttgccgccgctgttgcctccgctgctgggcgccggggcagctccccggtactctgcggccgccatggacgagcaggcgtgtcacggcgtcttcttcagcaacaaccacccgggcgccgcggtgcaaggtgctctgggctctgcggagtgctgccgcggccgcgacgggcgctgcgtggtatgcttcattgcctgatgtccagtgtcttgaaaactgttgtttcatttattttgtcgagttttttggttatctcaggagaggtgaactacagaatgaagctgtatttatgtggactgctgaactagaaaatatagccactctctgctttaaggctttggaaaactcaaattatggggtacgagtggcagtgtctaaacttttaggaacagtcatggccacagcattaatgccaaaacaggcaacagtaatgcgtcagaatgtgaagcgagcaacatttgatgaagtcttagaactcatggccacaggatttctgcgtggagggtcaggtttcttaaagagcggtggagaaatgttaaaagttggagggtccgttaatcgtgaagtgagagttggagttacgcaggcgtatgttgtttttgtgacaacattgggtggtcagtggttggagcgcagctttgccacgttcctgtcccatgtacttgatctggtttcccatcctcgggcaacacaaacacatgtggaggctgtgtactccagacgatgtgtttcctttatcctaagagctactgtgggcagtttgctaggtgaaaaagcccagattgcagctgccaaagaaatctgccaagctattggaaaacaaatgaaagccgtagaagcagtagtgaatgacacaagtggagaaaacaaatttggcgcagcagacattgcagcaagccagcatgtgatggtctgtgccctccaggaactcgggagcctggtgcagagcttgaatgccaccgcatcccctcttattcaagaagcatctatagggcttttggagattgtgacttcagtgctgcttcatccaagcatggctgcccgacttgctgctgcatggtgtttgcgctgtgtggctgtggcattacctttccagctgacaccatttctagacaggtgtgcagaacggctcaacaacttgaagacctcaccagaagctgtcagtggatatagttttgcaatggctgctttgttaggtggagtacatcagtgtcctttgggcattcctcatgccaaaggaaagatggtagttagtattgctgaagatcttttacgaactgctgcccaaaatagcaggctatctttacagcgcacccaagctggctggcttttacttggagcacttatgactttaggaccatctgtcgttcgttaccatctgcccaagatgttgttattgtggcgaaatgttttcccacgttccttaaaggaattggaagctgagaaggcccgaggcgattcttttacctggcaggtaactttggaaggtcgtgctggagctctatgtgccatgaggagcttcgttgcacattgtcctgagctactaactgaagatgtgattcgaaaattgatgacccctattgaatgtgccatgactatgatgtcacacattccatctgtaatgaaagcccatggagctcatctgaaagctagtgctgcaatggtccgtttaagactttatgatatcttggctttgttacctccaaaaacttatgaaggatcttttaatgcacttcttagagaactggtagcggaattcactttgactgacaactcagccaacacaactacttccctcctcagatccctctgccattatgatgatagtgttcttcttggttcttggcttcaggaaactgatcataaatcaattgaagaccagctccagccaaacagtgcctctggaagtggggctctggagcatgatccttcctctatttatttacgcatacctgctggagaagcagtacctggtcccctccctctcggagtctcagtcattgatgcttctgtggccctttttggtgtagtgtttcctcatgtttcttataaacaccgattacaaatgttggatcactttgctgaatgtgttaaacaagctaaaggtgtccgccagcaggctgtgcagcttaacatatttactgctgttcttagtgcactaaagggcttagctgaaaacaaaagtactttaggacctgaggaagttcgtaaatctgccctgacactggttatgggtcctctggacaacccaaaccccatcttacgttgtgcagcgggggaagctcttggaagaatggctcaggtggttggagaagcaacttttattgctagaatggcccaatatagctttgacaagttgaaatcggctcgagatgttgtatctaggactggtcattcattggctcttggttgtttgcatcgttatgttggtggaataggctcaggacaacatctgaagaccagtgtcagcattttattggctctagcacaagatgggacatcccctgaagtccagacttggtctcttcattcacttgctttgatagtggattctagtggtccgatgtatcgtggctatgtggaaccaacattatctctagttcttaccttgctgttgacagttccgccttcacatacagaagttcatcagtgtttgggtcgatgcttgggtgctataataactactgttggccctgaactacaagggaatggagcaacaacttctacaattcgttcctcttgtttggtgggttgtgcaataacacaagaccattcagattctcttgttcaggcagctgccatatcttgccttcagcagcttcacatgtttgcaccacgacatgtcaatctatctagccttgttcctagcctttgtgttcacttatgtagttcccatttgttacttcgacgagcagctgtggcatgtcttcggcaacttgcacaaagagaagcagcggaagtatgtgaatatgccatgagcctggcaaaaaatacaggggacaaagagagcagtagtgccaatgtcagtccttttgcccctggggttagttctcgaactgatatccattgccggcaccaaggtgttaatataacagaaactggtcttgagggacttctttttggaatgctagaccgggagacagatcgaaaattatgttctgatattcatgacactttgggacatatgctttcttcgctggcagtagaaaaactttctcattggctaatgctttgtaaagatgtcctggcagcttctagtgatatgagtactgcaactctcttaagtagtggaaaagatgaagaagctgaaaagaaagatgagatggatgatgataccatgtttaccacgttaggtgaagaagataaatcaaagccctttgtggcccctcgctgggccactcgagtatttgctgccgattgcctgtgtcgaatcatcaatttgtgtgagaatgcagaccaggctcactttgatcttgccttggcacgttctgctaaacttcgaaaccctacaaatgacctcttggtacttcatctctctgacctcattcgcatggcattcatggctgcaactgatcatagcaaccagctgcgaatggctgggctccaggcgcttgaagacattatcaagaagtttgcgtctgtgcctgagccagaatttccaggtcatgtgatactggagcagtatcaggctaatgtgggagctgctctaagaccagccttttcacaagatacaccatcagatataatagcgaaagcttgccaggtatgtagtacatggataggaagtggagttgtcagtgatctcaatgatctccgtcgagtacacaatcttcttgtttcttctctggacaaagttcaggctggaaaaggatcttccagccagctgtaccgagagagtgccacgaccatggaaaaactggctgttctcaaagcttgggcagaggtatatgtggtcgctatgaatattaaaaaggaagcagagtcaaaaccaaaaagagcaattaaaaatactgacgatgatgatgacgactgtggtaccatcgatgaactgccaccagatagtttaataacactggtacaacctgaactaccaacactcagtcgcctgtggttagcagcattaaaagattatgcactcttgactttaccagccgaattttctagtcagcttcctccagatggtggagcattttatacccctgaaactattgatacagctagacttcactatcggaattcctgggccccaattctccatgcggtggcactttggttaaatagcacaggatttacgtgctcagagtctacagaagcagcagcaatatctggtttacaaaaacgttctacatctgtcaatttaaaccaggcatcaggagcagtgggtagtgctaaatctttgccagaaattaacaaagacagaatgcatctgattttaggtgtgagtatacagtttctttgttcccctagacctgaggagcccattgaacatgttacagcatgcctgcaggccttacataccttgctagactccccttatgctcgagtccatattgcagaagatcagctgataggtgttgagttgctgagtgttttgcaccgccttctattgacctggaatccatcatctgtccagctgttggttactggagttgtacaacagatagtaagagctgctcaggattatttgcaagagaaaagaaacactctaaatgaagatgatatggaaaaagaggcctgtaccgtattgggagaaggaggtgacagcggtggtctcattcctggaaaatctcttgtgtttgcaactatggagctgctgatgttcattttagtacggcatatgccacatctcagtaccaaggtgtcagactctccaagtcacatagccactaaaactcgactatcagaagaaagtgctcgtttggtggcagccacagttaccatactctctgatttaccatccctttgttcacccgctggatgtatgacaatcctgcccacaattctgttcttaattgcaagaatattgaaagacacagcaataaagtctgcagataatcaggttcctccaccagtcagtgcagctcttcaagggattaaaagtattgtgacactttcaatggccaaaactgaggctggcgttcaaaaacagtggacagctctgattcgtagcacgcttgcttgcatcctggaatattctcaaccagaagactctgtacctacacctgatgaagtaagcatgctaacagcaattgcactcttcctgtggtctgctagtaatgaaataataggagtccagtcattacagaatggctgcatgaacagatttaaaaatgcattaaattcatgcgacccatgggttcaagccaaatgttaccagcttctcctctcagtcttccagcattccaatcgtgccctttcaactccttatattcattcattagctccaatagtggttgaaaagctaaaagctgttgaaagaaacagaccagccagtaacatagagcttttagcggttcaagaaggaataaaagttcttgaaacactggttgctcttggtgaagaacaaaacagagtccagctacttgctcttttagttcccactttgatatcttacctgctggatgaaaattcttttgcctcagcaagttcagcttccaaagatcttcatgagtttgcactccagaatttaatgcatattggacctctgtatccacatgctttcaagacagtaatgggggctgctcctgagttgaaagtgcgtctagaaactgccgttcgagcaagccaagcgagcaaagctaaagcggctgccagacaaccagcccccgccatacattctgcaccaacaattaagctaaaaacaagttttttttaatttgtaatttcatttatttgtatttatgttgtcaactagcccctaattagtgatggccactgtatcattccaggctacctatgggttctgttttatttgtatattggtattatagtgcttccaagtaggttaagtgaaataatgctcacaccatttattgatttttaaggagtgattttttttatcatgtggtgaatatgttttcattttcctcctaataatgtttctcttttgttaacttatttatttttcaaacactgagccatagtcttaaatttaaatgctaaaaacaattgtatcatgtagtcgggcagcctattgatactgtcaggggaaaaaaatgggtcagaactcagcatctgtcatgaaaaaaatcaattgaaaaacaagcagattttaaattttgaagtaatcaaaataatggaaagtgtctgttttgtggtgtatatactatgaataaaatcacagcattttctaagc

SEQ ID NO: 116 - DNA, 2757 bp, Homo sapiens
  CDS (781)..(2700)
aaatctgagcagtcagatcctcattatttcacatgggaaggtggcaattaataatattttctcaaacacatgaccctatattttgtcagcaagagtccccagttatgtgtcaaggagatatgacaggccccactatcatcattcttagacatttagactaattctgctcaaagtatcctttgtagactttattgcaggtctgtgaaagaataggtaaataaattgaaagtaagggctgagaaattttggtagcaatttgacattgttataatgtccaatttttctaatattttatttttattgtatcttacgaaatatccatatgcaatggattcgaaataaagaaaaatctggtccttcatcagaactaggaaagcactgatttaaacatttggtcagacattttaaattgaattagtaagctgtgtgggctggactactgctgaagagctgtattcatgtagtgatgatcaccagatagtgaagtggaacttgttaaccagtgaaacaactcaaatagtaaagcttcctgatgatatttaccctattgattttcactggtttccaaaaagtttgggtgtaaagaaacaaacccaggcagaaagctttgtcctcacaagttctgatggtaaatttcatctgatttccaagttaggaagagtggaaaaaagtgtagaagctcactgtggagcagtacttgcaggaagatggaattatgaaggaacagcattagttacagttggagaagatggacaaataaaaatttggtcaaagactgggatgcttagatcaactttagctcagcaaggaacaccagtgtattcagtagcgtggggccctgattcagaaaaggttctttatacagcaggcaagcagctaatcattaaacctcttcaaccaaatgctaaagttttgcagtggaaagctcatgatggcattattttaaaagtagattggaactcggtcaatgatcttattttatctgctggtgaagactgtaaatataaggtatgggatagttacggccgcccactgtacaattcacaacctcatgagcatcccattacttcagttgcctgggctccagatggagaattatttgctgttggatcgtttcatactttacgcttgtgtgataaaactgggtggtcatatgcattagaaaaacccaacactggcagcatatttaatattgcatggtctatcgatggcactcagattgctggagcctgtggaaatggacatgtcgtttttgcacatgtggtggaacaacattgggagtggaaaaattttcaagtaacattaacgaaaagaagagccatgcaggttcgtaatgttcttaatgatgcagtggatttactggaattccgtgatagagtcattaaagcatctttgaactatgcacacttagttgtttcaacgtctcttcaatgttacgtgttctccacgaagaactggaacacaccaattatatttgatctcaaagaaggaactgttagtttgattctgcaggcagaaagacattttcttcttgtagatggtagtagtatctatttatattcatatgaagggcgctttatttcatctccaaaatttcctggaatgagaacagatattctgaatgcacagactgtgtctttgagtaatgataccatagcaataagagacaaagctgatgaaaaaataatcttcctctttgaggcatcaaccggaaagccgttaggtgatggaaagtttctttctcataagaatgaaatcttggaaattgctctggatcaaaaaggacttaccaatgatagaaaaattgctttcattgataaaaatagagatctctgtatcacttctgtgaaacgatttgggaaggaagaacaaattatcaagcttggaacaatggtgcatactttggcatggaacgatacatgcaatatcctttgtggacttcaagatactcgatttatagtgtggtattaccccaatacagtttatgtggacagagacattttgcctaaaacattatatgaaagggatgcaagtgaatttagtaaaaatccccatattgtgagttttgttggaaatcaagtaactattagaagagctgatggctccctggttcacatcagcataacaccatatcctgctattctccatgaatatgtaagcagttcaaaatgggaagatgctgtgagactttgtcgctttgttaaggagcaaaccatgtgggcttgtctagctgctatggcagttgctaatcgagatatgactactgcagaaatagcctatgcagcaattggtgaaattgataaggttcagtacatcaattctataaaaaatcttccatctaaagaatcaaaaatggcccacatactactgtttagtgggaacatacaggaggctgaaatagtacttcttcaggctggccttgtttatcaagcaatccagatcaatattaatctctacaactgggaaagggcactggaattggctgtaaaatacaaaacacatgttgatacagttcttgcttaccgtcaaaagtttttggagacatttggtaaacaggaaactaataaacgatacttgcattatgcagaaggtctccaaatagattgggagaaaatcaaagccaaaattgagatggaaattacaaaagaaagagagcaatcatcaagcagccaatccagcaagagtataggtttaaagccctaaatgccatgcgtatctttaagaaattttatcttttgaaacacgttctgattaacc

SEQ ID NO: 117 - DNA, 693 bp, Homo sapiens
  CDS (58)..(435)
ccacgcgtccgcggacgcgtgggccgaaggggacgccgggaacaggaatttcttcacatggctcctggagaagtgaccatcacagttcgcctcatccgttcctttgaacatcgcaatttcaaacctgtagtgtatcacggagtgaatttggaccaaactgtaaaggaatttatcgtatttctaaagcaagatgtccctttaaggaccaacctgccaccaccattcagaaattataaatatgatgcactaaagattattcatcaagcacataaatcaaagacaaatgaacttgtgttgagtttggaagatgacgaaagactcctgctgaaagaagacagcactctgaaagcagctggaatcgccagtgaaactgaaattgcattcttctgtgaagaagattataggaactacaaagctaatcccatttcatcctggtgaaaacatctcgagggcttcctttttgcatacctgtattaagctctttattccactgctgagtttttgaaattgacaaacaaatcttaaaaaattaatcccaggctatactctttgagctaaaatctggttatttctttctcttcaggtctttctttccttctctctttctttttctttgttgttgtaaaataatatattatgagaaaaacatttgatctttttaaagggaaataaattgttattaaaaaaaaaaaa

SEQ ID NO: 118 - DNA, 2434 bp, Homo sapiens
  CDS (157)..(1557)
tgcccgggcgtcccctgcagacacgcagccccgtggaactcccggcgggacggttggggctggaggaacaggacgcccgctctcggcctcccttcccgggcctgggctgagggcagccgttggtgggtttcagggccgcctgggcagaatgtcacgatggacgagggcggcacgcccctgctccccgacagcctggtctaccagatcttcctgagcctgggcccggccgacgtgctggccgccgggctggtgtgccgccaatggcaggccgtgtcgcgggacgagttcctgtggagggagcagttctaccgctactaccaggtggcccgcgacgtgccccgacacccagcggccatgtcctggtacgaggagttccagcggctgtatgacacggtgccctgcgtggaggtgcagacgctgcgggaacacacagaccaggtcctgcacctcagcttctcccattccgggtaccagttcgcgtcctgctccaaggactgcactgtgaagatctggagcaacgacctgaccatctcgctgctgcacagcgcggacatgcggccctacaactggagctacacccagttctcccagttcaacaaggacgactcgctactgctggcctcgggggtgttcctggggccgcacaactcctcatccggcgagattgctgtcatcagcctagactccttcgcgctgctgtcccgcgtgcggaacaagccctatgacgtgtttggctgttggctcaccgagaccagcctcatctcggggaacctgcaccgcatcggagatatcacctcctgctcggtgctgtggctcaacaatgccttccaggatgtggagtcagagaacgtcaacgtggtgaagcggctgttcaagatccagaacctcaatgccagcaccgtccgcacggtgatggtggccgactgcagccgcttcgacagccctgacctgctgctggaagccggtgacccggccacgtccccctgccgcatctttgacctgggcagcgacaacgaggaggtggtggctggcccggcccccgcccacgccaaggagggcttgcggcactttctggaccgcgtgctggaggggcgggcgcagccacagctgtcggagcgcatgctagagaccaaggtggccgagctgctggcccagggccacaccaagccacccgagcgcagtgccacaggcgccaagagcaagtacctcatcttcaccactggctgcctcacctactccccacaccagatcggcatcaagcagatcctgccacaccagatgaccacggcagggcccgtgctgggtgagggccggggctccgatgccttcttcgacgcgctggaccacgtcatagacatacacggacacatcatcggcatgggcctgtcgcccgacaacaggtgggcctcttgccagtgtcccaggcggggtgcccgcaggcggcccacacctagcacagtgcccctcgcccaggtacctgtacgtgaacagccgcgcctggcccaacggtgcggtggtggccgaccccatgcagccgccaccaatcgcggaggagattgacctgctggtgttcgacctcaagaccatgcgggaggtgaggcgggctctgcgtgcgcaccgcgcctacacgcccaacgacgagtgcttcttcatcttcctggacgtcagcagggacttcgtggccagcggggcggaggaccggcacggctacatctgggaccgccactacaacatctgtctggccaggctgcggcacgaggatgtggtcaactcagtggtcttcagtccccaggagcaggagctgctgctcacggccagcgacgacgccaccatcaaagcctggcgctccccacgcaccatgcgcgtcctccaggcacctcgcccacggcctcgcaccttcttctcctggcttgccagccagaggcgctgaggtgtgctgggtgcactggagccaccgggaccccttgaggacatcgccaggctctgtggctttttcccgagcgggagaggtggagatgcttatagcagttacgccttaggaaggggacaaccaggccccgccacacgctcacacacaaacctgctcacgcagctgtgatgcttggcacggggtggccagtgcagatggagcccaaggccccctcggcctcctgggcaacttggggtacacaggatactgggggtgccgctcctcactcaaccccaggctaggggtacacctgacccagctggcctcggcccggggcaccttcggctggtcctgtggggccctggacggtggcccagtggtggcaggggctgctcctggctgtggttgtgcgcccggggcttgggagcggccggtcacgctgctgtgggcccgagtgtgttgcatgtccacgcaccacccgttcagggccctgaataaacagttggcaacagcaaaaaaaaaaaa

SEQ ID NO: 119 - DNA, 4389 bp, Homo sapiens
  CDS (223)..(2388)
attctttggaatactactgctagaagtctgacttaagacccagcttatgggccacatggcacccagctgcttctgcagagaaggcaggccactgatgggtacagcaaagtgtggtgctgctggccaagccaaagacccgtgtaggatgactgggcctctgccccttgtgggtgttgccactgtgcttgagtgcctggtgaagaatgtgatgggatcactagcatgtctgcggagagcggccctgggacgagattgagaaatctgccagtaatgggggatggactagaaacttcccaaatgtctacaacacaggcccaggcccaaccccagccagccaacgcagccagcaccaaccccccgcccccagagacctccaaccctaacaagcccaagaggcagaccaaccaactgcaatacctgctcagagtggtgctcaagacactatggaaacaccagtttgcatggcctttccagcagcctgtggatgccgtcaagctgaacctccctgattactataagatcattaaaacgcctatggatatgggaacaataaagaagcgcttggaaaacaactattactggaatgctcaggaatgtatccaggacttcaacactatgtttacaaattgttacatctacaacaagcctggagatgacatagtcttaatggcagaagctctggaaaagctcttcttgcaaaaaataaatgagctacccacagaagaaaccgagatcatgatagtccaggcaaaaggaagaggacgtgggaggaaagaaacagggacagcaaaacctggcgtttccacggtaccaaacacaactcaagcatcgactcctccgcagacccagacccctcagccgaatcctcctcctgtgcaggccacgcctcaccccttccctgccgtcaccccggacctcatcgtccagacccctgtcatgacagtggtgcctccccagccactgcagacgcccccgccagtgcccccccagccacaacccccacccgctccagctccccagcccgtacagagccacccacccatcatcgcggccaccccacagcctgtgaagacaaagaagggagtgaagaggaaagcagacaccaccacccccaccaccattgaccccattcacgagccaccctcgctgcccccggagcccaagaccaccaagctgggccagcggcgggagagcagccggcctgtgaaacctccaaagaaggacgtgcccgactctcagcagcacccagcaccagagaagagcagcaaggtctcggagcagctcaagtgctgcagcggcatcctcaaggagatgtttgccaagaagcacgccgcctacgcctggcccttctacaagcctgtggacgtggaggcactgggcctacacgactactgtgacatcatcaagcaccccatggacatgagcacaatcaagtctaaactggaggcccgtgagtaccgtgatgctcaggagtttggtgctgacgtccgattgatgttctccaactgctataagtacaaccctcctgaccatgaggtggtggccatggcccgcaagctccaggatgtgttcgaaatgcgctttgccaagatgccggacgagcctgaggagccagtggtggccgtgtcctccccggcagtgccccctcccaccaaggttgtggccccgccctcatccagcgacagcagcagcgatagctcctcggacagtgacagttcgactgatgactctgaggaggagcgagcccagcggctggctgagctccaggagcagctcaaagccgtgcacgagcagcttgcagccctctctcagccccagcagaacaaaccaaagaaaaaggagaaagacaagaaggaaaagaaaaaagaaaagcacaaaaggaaagaggaagtggaagagaataaaaaaagcaaagccaaggaacctcctcctaaaaagacgaagaaaaataatagcagcaacagcaatgtgagcaagaaggagccagcgcccatgaagagcaagccccctcccacgtatgagtcggaggaagaggacaagtgcaagcctatgtcctatgaggagaagcggcagctcagcttggacatcaacaagctccccggcgagaagctgggccgcgtggtgcacatcatccagtcacgggagccctccctgaagaattccaaccccgacgagattgaaatcgactttgagaccctgaagccgtccacactgcgtgagctggagcgctatgtcacctcctgtttgcggaagaaaaggaaacctcaagctgagaaagttgatgtgattgccggctcctccaagatgaagggcttctcgtcctcagagtcggagagctccagtgagtccagctcctctgacagcgaagactccgaaacaggtcctgcctaatcattggacacggactcttaataaaacggtcttcagttccagattccttcccagcaagctatagcttaagtccattttcttccgtgaaagggacaggactccatcaagttatggaattcctcagagccctgggcctgtcccccggggtggattagtcatgtccagcagcacacgcctagtcccgccttcgggaaggctgcctgcctggccagccgcccaggcctctctgtgtaaagactgcctggctgtcctgcccagccttcctggttctctggggtcctctgggtgggtggcatctcctggagggtgatgacaatccccaacacatgcattcatgtggtgctactctgtgtgcaaagccagaccccaagtatgttttctctctttgtcccatccctctttttctgggactttggaccctaactacttccctcctgaaccttgcagtgacatcagtccaggagagctctcgttcagtgtgcggaagaacactctgacctctagagctgtcctagataaggagtgggagctttagaggcaaggcctctagaccctggaaggctcagtgaggctcttcccacagcatgcttctcactggtgccctgtaaggctcgagccaccgctgactctgagccttttggagtctttcctccttcgtctccattgttcccgtgcatttccaaaagcttaagttgcctggtgggcatttccccagtttctttggcctccgtcttctcaagtcacatagggaaagtacctcctggaaccaggctgcagtatgcaggacctgccaggcaggcactggtgaagggccttgggcctatcatcccctcaaccccacctcaccccacccgcctcctctagtggggtgagtctgggctggtggaccagagagggtgtcacagaccctcagggactgccccatggacacctctgactggtgttaacagtgtgaacattttccccgtcttcagtcccttagaatgacgacagcccctggggttggggcaggcgagtgtggccacatcatccaagccctcccagagacacaaataggcttttttgctctaaaaataaataccagcccttttttggtcacaaatccagcatctcagcagaaaactgcctgacatgaaaagtcccctgaggaactgcatctgcgtttcaggggcttttcattttttctccttttttaaagtgtagattgtgggtgcttcctagaggcctgccttcttctggaactggaagtgggctatcaccatgggcaagcccttgggtgcaggctccccacctgcctgggaactctggcagctctcctcagctccttgggcttgagcagctgcaactgccccagatttgctgtggaagcaggggctagccctggcctcaccagggcctcccggggccctgcattgatgctcaggagttcctgggctgctcttgatcctttctgggcatccagcttccagttaagctctgtttgccaaacaaactattctcagctgccctttggcctgcgcctgatgtgttcctgttgcagtcccgcctgcctgagacaggagcaggcaggagagccttcatgcccagattcccacaggacaattggggagctgctggcattgtctttctgggaagattctgctttcttggaccaaatggcagcctgattaccagtgtcgggcctgcatgctgcccccgacacacgcacgcacgcgcacacacgtgtgcacatgggccatagccacaagccagctctcctccagggtcctttcaacctcgctgtccagggaccctgtccttcttgcccgtggggcttccatctggcagagaacgttcagggcttgttgaacttgaaagctcattagacttaagctgtcacctgtgcttggtgccccaggaacagccagagaggacagtgcccactcacttcttgttggcagcctcctgtgcaggaagtgccagccgggcctcgacgcaccagctggctgtgggtcctga

SEQ ID NO: 120 - DNA, 1796 bp, Homo sapiens
  CDS (55)..(1743)
cgagagccgcgtccacgttcctgcctcctgctcccgccgccctggggcgccgccatgacgcccgatctgctcaacttcaagaagggatggatgtcgatcttggacgagcctggagagcctccctccccctcgctcaccaccacctctacttcgcagtggaagaaacattggtttgtgctgacagattcaagtctcaaatattacagagactccactgctgaggaggcagatgagctggatggtgagatcgacctgcgttcctgcacggatgtcactgagtacgcggtgcagcgcaactatggcttccagatccacaccaaggatgctgtctataccttgtcggccatgacctcaggcatccggcggaactggatcgaggctctgagaaagaccgtacgtccaacttcagccccagatgtcaccaagctctcggactctaacaaggagaacgcgctgcacagctacagcacccagaagggccccctgaaggcaggggagcagcgggcgggctctgaggtcatcagccggggtggccctcggaaggcggacgggcagcgtcaggccttggactacgtggagctctcgccgctgacccaggcttccccgcagcgggcccgcaccccagcccgcactcctgaccgcctggccaagcaggaggagctggagcgggacctggcccagcgctccgaggagcggcgcaagtggtttgaggccacagacagcaggaccccagaggtgcctgctggtgaggggccgcgccggggcctgggtgcccccctgactgaggaccagcaaaaccggcttagtgaggagatcgagaagaagtggcaggagctggagaagctgcccctgcgggagaataagcgggtgcccctcactgccctgctcaaccaaagccgcggagagcgccgagggcccccaagtgacggccacgaggcactggagaaggaggttcaggctcttcgggcccagctggaggcgtggcgtctccaaggggaggctcctcagagtgcactgagatcccaggaggatggccacatccccccgggctacatctcacaggaggcatgtgagcgcagcctggcagagatggagtcctcgcaccagcaggtgatggaggagctgcagcggcaccacgagcgggagctgcagcgcctgcagcaggagaaggagtggctcctggctgaggagacggcagccacggcctcagccattgaagccatgaagaaggcctaccaggaagagctgagccgagagctgagcaaaacacggagtctccagcagggcccggatggcctccggaagcagcaccagtcagatgtggaggcactgaagcgagagctgcaggtgctatcggagcagtactcgcagaagtgcctggagattggggcactcatgcggcaggctgaggagcgcgagcacacgctgcgccgctgccagcaggagggccaggagctgctgcgccacaaccaggagctgcatgggccgcctgtcagaggagatagaccagctgcgcggcttcattgcctcgcagggcatgggcaatggctgcgggcgcagcaacgagcggagttcctgcgagctagaggtgctgcttcgcgtaaaagaaaacgaactccagtacctaaagaaggaggtgcagtgcctccgggacgagctccagatgatgcagaaggacaagcgcttcacctcgggaaagtaccaggacgtctatgtggagctgagccacatcaagacacggtctgagcgggagatcgagcagctgaaggagcacctgcgtcttgccatggccgccc

SEQ ID NO: 121 - DNA, 1683 bp, Homo sapiens
  CDS (967)..(1368)
gttctggaaatagagtggtttgttttattttgagacagtggcacctaggctggagtgcactgaagcgtcaacctcctaggcccaagtgatccttccacctcagcctcctgagtagctgggactacaggcacctgctaccacgcctgactaatttttgtatttttagtacagatggggtttcgccacgttggccaggctggtctcgaactcctgacctcaggtgatctgcccgtctcgtcctcccaaagtgctgggattacaggtgtgagccaccacgcccagccaccactacgcactttaaaaccaaaaaaagctcaaagggatggatcattgtccatggctcaggagccccactgtgggctaagtgtgatgtcgatggattaatttagacagtggtgtattcatcagggcaaaggaaattcttccagaggtgatgatgcggcagactacttcccagtcgtctctcccaaacgcatagcatggcccgtcgttgtcgactcctcgtcgagttgggctggcaaccagctttgccactcgctttcctacgaatgctactcaacgcctcgttctgtaaactactcgaagcgaattcgactgggcgttcgagcgaaacggatggctgcatgtgaccagggtcccaaggccacagcttttcagatcctaggaagcaagtggcatttgcttgagttgtggcctcggaaggagaatgtttatctgttttctaactttgctgacaccaggattctccctgtcattgagaagaaagcattatctaattaccttcaggtggtttacttattctgtaaagaatatgtgtaaatattttgtacagagccctgtatcaaataaacagccatatgtggttactaatcacctcttctgtcattccgtccttggccaccgctcagtgggaatggtctctgatctggatgctcccaccttccatgtcaggcccagaactgtgccatggtctgtggactcctggtcagccttgactggctaggagaccttgggcagtacctacagtcttgctgtttctgtttcatctgcaagaattatgacccacacactccagctgcagcccagggcactgtgatattttatacgtgtgtagatgtttttgtccacagttcctggttcatcactcccataaccctttgttataatgttgggacactgcaggcctcagaaaacggaatctctgtctgtgaccttctcctgccccatttcacttgctcaacaccagactttaatctgactgtagctcataagaccctcattccagagagggtgctgccccatacccggaaggaggaacgctgcacagagaggccaagaagcatctggacagacaggccttgctgggtttagaccttatgctttttgtccagtttcatctcaacacagctgccatgcttcagccatgcctatccaatgacgtctccataaaaggcccaggaacacgggagcttctgaagagctgaacatgtggagggaggggaacgagaacttgtccatgtgccaagagggtggcgcacccccactccatggggacagaagctccagcatttgcccaggacccgtccagacctcaccctgtgtgtatcttcatctggctgtttacttatttgtatccttttctaataacgtttgtaataaactggtaaacataaaaaaaaaaaa

SEQ ID NO: 122 - DNA, 9212 bp, Homo sapiens
  CDS (2915)..(9037)
atggcacaactagaagagtctacaatgttacccagcacgctgctggcattgttgtataccaacaagggcctgattcttgccaagagaattaatgtgcgtatcgagcacattaagctcactaagagccgagatagcttcctgaaacacatgaaggaaaatgaccagaaaaagaaaacaaagagaaaggcggcgggaccagtgcagccgccgcctcccaggatcgtccgccggtcagggcccttgccctccccggcacaggccaccatggccaccaacccacagccgcagccgcctcctccggcgccgccgcctcccccgccgcagccgcagccgcagccaccgccgccgccgccgggccccggggctggccccggcgcgggcggggcgggcggcgcgggtgcgggcgccggggacccgcagctcgtggccatgatcgtgaaccacctcaagagccaggggctcttcgaccagttccgcagagactgcctggccgacgtggacaccaagcctgcgtatcagaatctgagacagcgtgttgacaactttgttgcaaatcacttggcaactcacacatggagtccgcatctcaataagaaccagctaagaaacaacattagacaacaagtcctcaaatcaggaatgttggagtctggtattgaccgaattatttctcaggttgtggacccaaagatcaaccacacattcagacctcaggtagagaaagctgtgcatgagtttttggccacgctaaatcacaaagaggaaggaagtggcaacacagctcccgatgatgagaaaccagacacttcccttattacacaaggtgttcctactcctgggcccagtgctaatgtagccaatgatgccatgtcgatattggaaaccataacttctcttaaccaagaagccagtgctgctagggcttcaacagaaacatcaaatgccaagaccagtgagagagcgtcaaaaaaacttccatctcagccaaccactgatactagtactgacaaagaaagaacttcagaggacatggctgataaagaaaaatctacagctgactctggaggtgaaggactggaaacagccccaaagtctgaagagttcagcgacctcccctgtccagtcgaagaaattaaaaattacacaaaagagcataataatttaattctgctaaataaggatgttcaacaggaaagcagtgagcaaaaaaataaatcaacagacaaaggtgaaaagaagccagacagcaatgagaaaggagaaagaaagaaagaaaagaaggaaaagactgaaaagaaatttgatcactcaaaaaagagtgaagatacacagaaagttaaagatgaaaaacaagcaaaggaaaaagaagtagagagtttaaaacttccttcagaaaagaacagtaataaagctaaaactgttgaagggacaaaagaagatttctctttgatagattctgatgtggatggacttacagacatcacagttagctctgttcataccagtgacctttcatcttttgaagaagatactgaggaggaagttgtaacgtctgatagcatggaagaaggagagattacgtcagatgatgaagagaagaacaaacagaataaaacaaaaactcaaactagtgattctagtgaaggaaaaacaaaaagtgtacggcatgcgtatgtccacaaaccatatctttactcaaaatactatagtgattctgatgatgagcttactgtagaacaacgacgacagtccattggtattttgtggttttaggccaaagaaaaagaagagaggcttttaagaaggcaaatcaatagagaaaaacttgaagaaaaacgaaaacagaaagcagaaaagacaaagtcttcaaaaaccaagggtcaaggcaggagtagtgtggacttagaagaatcatcaacaaagagtttggaacctaaagccgccagaattaaagaagtccttaaagaacggaaagttttagaaaaaaaagtagccttaagcaaaaagagaaaaaaagattcaaggaatgttgaagagaactccaaaaagaaacagcaatatgaagaagattccaaagaaacccttaaaacaagtgagcattgtgaaaaggaaaaaatttcttcttcaaaggagctgaagcatgttcatgcaaaaagtgaaccaagtaaacctgcccggagactttcagagtctttgcatgtagttgacgaaaacaaaaatgaatccaaaatagaaagagaacataaaagacggacatctacccctgttatcatggagggggtacaggaagagactgacacaagagatgtaaaaaggcaagtagaacgctcagaaatttgcaccgaagagccccagaaacagaaaagcacacttaaaaacgaaaagcatctaaagaaagatgattctgaaacaccacatttgaaaagcctacttaagaaagaggtgaaatcctccaaggagaagcctgaaagagagaaaactccatcggaagacaaattgtctgtgaaacataaatataaaggtgattgtatgcataaaacaggtgatgagactgagcttcactcttctgagaaaggtttaaaagtagaggaaaatattcaaaagcaaagtcaacaaacaaagctttcttcagatgataaaaccgaacgaaaaagtaaacataggaatgaaaggaaattatcagtattaggcaaagatggaaagccagtttctgaatatattataaaaacagatgagaatgttcgtaaaaaaaaaaaaaaaaaatgagagacgcttgtcagctgaaaaaactaaggcagagcacaaatcaagaaggtcaagtgattctaaaattcagaaagattctctgggttccaagcaacatggtatcacattacagagaagaagtgaaagttattcggaagataagtgtgatatggactccactaacatggatagtaatttgaaaccagaagaggttgttcacaaggagaaacgacgaacaaagagcttgttagaagagaaacttgtgttgaagtctaaatcaaaaactcaaggcaaacaggtaaaagttgtagaaacagaattacaagaaggtgccacaaaacaggcaaccactccaaaaccagacaaggagaagaacacagaagaaaatgactcagaaaaacagcgtaagtctaaagttgaagacaaaccttttgaagaaactggtgttgaacctgtattagagactgcttcttcttcagcacatagtacacagaaggattctagtcatagagccaagttaccattagcaaaggagaaatataagagtgataaagactccacttccaccaggcttgagagaaagttgtcagatggccacaaaagcagaagcttaaagcatagtagtaaaaacataaaaaaaaaggacgaaaataaatcagatgacaaggatggtaaagaagttgacagtagtcatgaaaaggccagaggtaatagttcactcatggaaaagaaattaagtagaaggttgtgcgaaaatcggagaggaagcttgtcacaagaaatggccaaaggagaagaaaaattagcagcaaacactttgagcactcccagcggttcctcccttcagagaccaaaaaagagtggtgatatgacattgatccctgaacaagagccaatggaaattgattctgagccaggtgttgaaaatgtgtttgaagtatctaaaacccaagacaaccgcaataataattctcagcaagacattgactctgaaaatatgaaacaaaaaacttctgccactgttcaaaaggatgaattgagaacttgcacagcagattcaaaagcaacagctccagcttataagccaggccgtggaacaggagttaatagtaattctgaaaagcatgccgatcatagaagcaccttgaccaagaaaatgcatatacaaagtgctgtgtccaaaatgaaccctggggagaaagaacccattcatagaggaactactgaagtgaatatagattctgaaactgttcatagaatgttactgagtgccccatcagaaaatgatagggtacagaagaatttgaaaaacacagctgctgaagaacatgttgctcaaggagatgccactcttgaacattccacaaatttagactcctcaccatccttaagttcagtgactgttgtgcctctgagggaatcgtatgatccagatgtaattcctctgtttgacaaaagaactgttttggaaggtagcacagccagcacctcccctgcggatcactctgctctccctaaccaaagtctgactgttagggaatcagaagtccttaagacaagtgacagcaaagaaggtggtgaaggtttcacagtagatacaccagcaaaagcaagcatcactagcaaaagacacattccagaagctcaccaggctactttattggatggtaaacaaggaaaggtaatcatgcctcttggaagtaagttaacgggcgtgattgtggaaaatgagaatattaccaaagaaggtggcttagtggacatggccaagaaagaaaatgacttaaatgcagagcccaatttaaagcagacaattaaagcaacagtagagaatggcaagaaggatggcattgctgttgatcatgttgtaggcctgaatacagaaaaatatgctgaaactgtcaaacttaagcataaaagaagcccaggtaaagtaaaagacatatcaattgatgttgaaagaaggaatgaaaacagtgaggtagacaccagtgctggaagtggctctgcaccctctgttttacaccaaaggaacggacaaactgaggatgtggcaactgggcctaggagagcagaaaagacttctgttgccactagtactgaagggaaggacaaagatgtcaccttaagtccagtgaaggctgggcctgccacaaccacttcttcagaaacaagacaaagtgaggtggctttgccttgcaccagcattgaggcagatgaaggcctcataataggaacacattccagaaataatcctcttcatgttggtgcagaagccagtgaatgcactgtttttgctgcagctgaagaaggtggggctgttgtcacagagggatttgctgaaagtgaaaccttcctcacaagcactaaggaaggggaaagtggggagtgtgctgtggctgaatctgaggacagagcagcagacctactggctgtgcatgcagttaaaatcgaagccaatgtaaatagcgttgtgacagaggaaaaggatgatgctgtaaccagtgcaggctctgaagaaaaatgtgatggttctttaagtagagactcagaaatagttgaaggaactattacttttattagtgaagttgaaagtgatggagcagttacaagtgctggaacagagataagagcaggatctataagcagtgaagaggtggatggctcccagggaaatatgatgagaatgggtcccaaaaaagaaacagagggcactgtgacatgtacaggagcagaaggcagaagtgataactttgtgatctgctcagtaactggagcagggccccgggaggaacgcatggttacaggtgcaggtgttgtcctgggagataatgatgcaccaccaggaacaagtgccagccaagaaggagatggttctgtgaatgatggtacagaaggtgagagtgcagtcaccagcacggggataacagaagatggagaggggccagcaagttgcacaggttcagaagatagcagcgaaggctttgctataagttctgaatcggaagaaaatggagagagtgcaatggacagcacagtggccaaagaaggcactaatgtaccattagttgctgctggtccttgtgatgatgaaggcattgtgactagcacaggcgcaaaagaggaagacgaggaaggggaggatgttgtgactagtactggaagaggaaatgaaattgggcatgcttcaacttgtacagggttaggagaagaaagtgaaggggtcttgatttgtgaaagtgcagaaggggacagtcagattggtactgtggtagagcatgtggaagctgaggctggagctgccatcatgaatgcaaatgaaaataatgttgacagcatgagtggcacagagaaaggaagtaaagacacagatatctgctccagtgcaaaagggattgtagaaagcagtgtgaccagtgcagtctcaggaaaggatgaagtgacaccagttccaggaggttgtgagggtcctatgactagtgctgcatctgatcaaagtgacagtcagctcgaaaaagttgaagataccactatttccactggcctggtcgggggtagttacgatgttcttgtatctggtgaagtcccagaatgtgaagttgctcacacatcaccaagtgaaaaagaagatgaggacatcatcacctctgtagaaaatgaagagtgtgatggtctcatggcaactacagccagtggtgatattaccaaccagaatagcttagcagggggtaaaaatcaaggcaaagttttgattatttccaccagtaccacaaatgattacacccctcaggtaagcgcaattacagatgtggaaggaggtctctcagatgctctgagaactgaagaaaatatggaaggtaccagagtaaccacagaagaatttgaggcccccatgcccagtgcagtctcaggagatgacagccaactcactgccagcagaagtgaagagaaagatgagtgtgccatgatttccacaagcataggggaagaattcgaattgcctatctccagtgcaacaaccatcaagtgtgctgaaagtcttcagccggttgctgcagcagtggaagaaagggctacaggtccagtcttgataagcaccgccgactttgaggggcctatgcccagtgcgcccccagaagctgaaagtcctcttgcctcaaccagcaaggaggagaaggatgaatgtgctctcatttccactagcatagcagaagaatgtgaggcttctgtttccggtgtagttgttgaaagtgaaaatgagcgagctggcacagtcatggaagaaaaagacgggagtggcatcatctctacgagctcggtggaagactgtgagggcccagtgtccagtgctgtccctcaagaggaaggcgacccctcagtcacaccagcggaagagatgggtgacaccgccatgatttccacaagcacctctgaagggtgtgaagcagtcatgattggtgctgtcctccaggatgaagatcggctcaccatcacaagagtagaagacttgagcgatgctgccatcatctccaccagcacagcagaatgtatgccaatttccgccagcattgacagacatgaagagaatcagctgactgcagacaacccagaagggaacggtgacctgtcagccacagaagtgagcaagcacaaggtccccatgcccagcctaattgctgagaataactgtcggtgtcctgggccagtcaggggaggcaaagaaccgggtcccgtgttggcagtgagcaccgaggaggggcacaacgggccatcagtccacaagccctctgcagggcaaggccatccaagtgctgtttgtgcggaaaaagaagagaagcatggcaaggagtgccccgaaataggaccatttgcaggaagaggacagaaagagagcactttacacctcataaatgcagaagagaagaatgtattgttgaactcccttcagaaagaagataagagcccagagacagggacagcagggggcagtagcacagcaagttattcagcaggaaggggcttagaggggaatgctaactcacctgcccacctgagaggaccagaacagacgtctgggcagacggctaaggattcctctgtcagcagcattcgctatttggcagcagtaaacaccggtgctataaaagctgatgacatgccacctgttcaagggaccgtggctgagcattcctttcttcctgctgagcagcaggggtctgaagacaacttgaaaaccagtaccaccaaatgtattactggccaagaatcaaaaattgctccttcccacacaatgatccctccagctacttacagtgtagctctgttggctcctaaatgtgagcaggacttgactataaagaatgattatagtggcaaatggactgatcaagcatctgctgagaaaacaggagatgataacagcacaaggaaatcattccctgaggaaggagacataatggttactgtgtcttctgaagaaaatgcttatgtgccttcagaggaagagaaaaatggtgaaattctggcaccaccagaaagtctgtgtgggggaaagccaagtggaatagagatatccagtggtagaaaagacaacgcagaagccataagcggtcacagtgttgaagcagatcctaaagaggaagagaactccagagatttggaagaattacctaaaaccagttctgagacaaatagcactacctcaagggtcatggaagaaaaagatgaatatagcagcagtgaaactactggtgaaaagccagagcagaacgatgatgacaccataaaatctcaggaggatgatggtgaagaaaaaatagtaacaagtgtgcgtcggagaggaagaaaacccaaacgttctctcactgtatcagatgatgctgaatcctcagagccagaaagaaaacgccagaaatcagtttctgatccagtggaggacaagaaagagcaggagtctgatgaggaagaggaagaagaggaagaggacgagccttcaggagccaccacaagatccaccaccagatcagaggctcagagaaagcaacatagcaagccatctgcacgtgcaacatccaaacttggcagcccagacacagtttctcctagaaatcgccaaaaattagcaaaagagaagttacctaccagcgaaaaagttagtaactctcccccattaggaagatcaaagacacagctctccccttctatcaagcgcaagagagaagtcagccctcctggggcccgaacaagaggccagcaaagggtggaggaagcccctgtgaaaaaagcgaagcgataatcctgaccactgctgccctaggcttatggaggaacacggtggagaggaaagagacatgccttggtggccataggcttctctttaaccaggaaaaagatatgcatgtgctgtaagtccctagggtgcaagctttttcttgttatgttttaaacagctttataaactattgttg

SEQ ID NO: 123 - DNA, 9071 bp, Homo sapiens
  CDS (2915)..(8896)
atggcacaactagaagagtctacaatgttacccagcacgctgctggcattgttgtataccaacaagggcctgattcttgccaagagaattaatgtgcgtatcgagcacattaagctcactaagagccgagatagcttcctgaaacacatgaaggaaaatgaccagaaaaagaaaacaaagagaaaggcggcgggaccagtgcagccgccgcctcccaggatcgtccgccggtcagggcccttgccctccccggcacaggccaccatggccaccaacccacagccgcagccgcctcctccggcgccgccgcctcccccgccgcagccgcagccgcagccaccgccgccgccgccgggccccggggctggccccggcgcgggcggggcgggcggcgcgggtgcgggcgccggggacccgcagctcgtggccatgatcgtgaaccacctcaagagccaggggctcttcgaccagttccgcagagactgcctggccgacgtggacaccaagcctgcgtatcagaatctgagacagcgtgttgacaactttgttgcaaatcacttggcaactcacacatggagtccgcatctcaataagaaccagctaagaaacaacattagacaacaagtcctcaaatcaggaatgttggagtctggtattgaccgaattatttctcaggttgtggacccaaagatcaaccacacattcagacctcaggtagagaaagctgtgcatgagtttttggccacgctaaatcacaaagaggaaggaagtggcaacacagctcccgatgatgagaaaccagacacttcccttattacacaaggtgttcctactcctgggcccagtgctaatgtagccaatgatgccatgtcgatattggaaaccataacttctcttaaccaagaagccagtgctgctagggcttcaacagaaacatcaaatgccaagaccagtgagagagcgtcaaaaaaacttccatctcagccaaccactgatactagtactgacaaagaaagaacttcagaggacatggctgataaagaaaaatctacagctgactctggaggtgaaggactggaaacagccccaaagtctgaagagttcagcgacctcccctgtccagtcgaagaaattaaaaattacacaaaagagcataataatttaattctgctaaataaggatgttcaacaggaaagcagtgagcaaaaaaataaatcaacagacaaaggtgaaaagaagccagacagcaatgagaaaggagaaagaaagaaagaaaagaaggaaaagactgaaaagaaatttgatcactcaaaaaagagtgaagatacacagaaagttaaagatgaaaaacaagcaaaggaaaaagaagtagagagtttaaaacttccttcagaaaagaacagtaataaagctaaaactgttgaagggacaaaagaagatttctctttgatagattctgatgtggatggacttacagacatcacagttagctctgttcataccagtgacctttcatcttttgaagaagatactgaggaggaagttgtaacgtctgatagcatggaagaaggagagattacgtcagatgatgaagagaagaacaaacagaataaaacaaaaactcaaactagtgattctagtgaaggaaaaacaaaaagtgtacggcatgcgtatgtccacaaaccatatctttactcaaaatactatagtgattctgatgatgagcttactgtagaacaacgacgacagtccattggtattttgtggttttaggccaaagaaaaagaagagaggcttttaagaaggcaaatcaatagagaaaaacttgaagaaaaacgaaaacagaaagcagaaaagacaaagtcttcaaaaaccaagggtcaaggcaggagtagtgtggacttagaagaatcatcaacaaagagtttggaacctaaagccgccagaattaaagaagtccttaaagaacggaaagttttagaaaaaaaagtagccttaagcaaaaagagaaaaaaagattcaaggaatgttgaagagaactccaaaaagaaacagcaatatgaagaagattccaaagaaacccttaaaacaagtgagcattgtgaaaaggaaaaaatttcttcttcaaaggagctgaagcatgttcatgcaaaaagtgaaccaagtaaacctgcccggagactttcagagtctttgcatgtagttgacgaaaacaaaaatgaatccaaaatagaaagagaacataaaagacggacatctacccctgttatcatggagggggtacaggaagagactgacacaagagatgtaaaaaggcaagtagaacgctcagaaatttgcaccgaagagccccagaaacagaaaagcacacttaaaaacgaaaagcatctaaagaaagatgattctgaaacaccacatttgaaaagcctacttaagaaagaggtgaaatcctccaaggagaagcctgaaagagagaaaactccatcggaagacaaattgtctgtgaaacataaatataaaggtgattgtatgcataaaacaggtgatgagactgagcttcactcttctgagaaaggtttaaaagtagaggaaaatattcaaaagcaaagtcaacaaacaaagctttcttcagatgataaaaccgaacgaaaaagtaaacataggaatgaaaggaaattatcagtattaggcaaagatggaaagccagtttctgaatatattataaaaacagatgagaatgttcgtaaaaaaaaaaaaaaaaaatgagagacgcttgtcagctgaaaaaactaaggcagagcacaaatcaagaaggtcaagtgattctaaaattcagaaagattctctgggttccaagcaacatggtatcacattacagagaagaagtgaaagttattcggaagataagtgtgatatggactccactaacatggatagtaatttgaaaccagaagaggttgttcacaaggagaaacgacgaacaaagagcttgttagaagagaaacttgtgttgaagtctaaatcaaaaactcaaggcaaacaggtaaaagttgtagaaacagaattacaagaaggtgccacaaaacaggcaaccactccaaaaccagacaaggagaagaacacagaagaaaatgactcagaaaaacagcgtaagtctaaagttgaagacaaaccttttgaagaaactggtgttgaacctgtattagagactgcttcttcttcagcacatagtacacagaaggattctagtcatagagccaagttaccattagcaaaggagaaatataagagtgataaagactccacttccaccaggcttgagagaaagttgtcagatggccacaaaagcagaagcttaaagcatagtagtaaaaacataaaaaaaaaggacgaaaataaatcagatgacaaggatggtaaagaagttgacagtagtcatgaaaaggccagaggtaatagttcactcatggaaaagaaattaagtagaaggttgtgcgaaaatcggagaggaagcttgtcacaagaaatggccaaaggagaagaaaaattagcagcaaacactttgagcactcccagcggttcctcccttcagagaccaaaaaagagtggtgatatgacattgatccctgaacaagagccaatggaaattgattctgagccaggtgttgaaaatgtgtttgaagtatctaaaacccaagacaaccgcaataataattctcagcaagacattgactctgaaaatatgaaacaaaaaacttctgccactgttcaaaaggatgaattgagaacttgcacagcagattcaaaagcaacagctccagcttataagccaggccgtggaacaggagttaatagtaattctgaaaagcatgccgatcatagaagcaccttgaccaagaaaatgcatatacaaagtgctgtgtccaaaatgaaccctggggagaaagaacccattcatagaggaactactgaagtgaatatagattctgaaactgttcatagaatgttactgagtgccccatcagaaaatgatagggtacagaagaatttgaaaaacacagctgctgaagaacatgttgctcaaggagatgccactcttgaacattccacaaatttagactcctcaccatccttaagttcagtgactgttgtgcctctgagggaatcgtatgatccagatgtaattcctctgtttgacaaaagaactgttttggaaggtagcacagccagcacctcccctgcggatcactctgctctccctaaccaaagtctgactgttagggaatcagaagtccttaagacaagtgacagcaaagaaggtggtgaaggtttcacagtagatacaccagcaaaagcaagcatcactagcaaaagacacattccagaagctcaccaggctactttattggatggtaaacaaggaaaggtaatcatgcctcttggaagtaagttaacgggcgtgattgtggaaaatgagaatattaccaaagaaggtggcttagtggacatggccaagaaagaaaatgacttaaatgcagagcccaatttaaagcagacaattaaagcaacagtagagaatggcaagaaggatggcattgctgttgatcatgttgtaggcctgaatacagaaaaatatgctgaaactgtcaaacttaagcataaaagaagcccaggtaaagtaaaagacatatcaattgatgttgaaagaaggaatgaaaacagtgaggtagacaccagtgctggaagtggctctgcaccctctgttttacaccaaaggaacggacaaactgaggatgtggcaactgggcctaggagagcagaaaagacttctgttgccactagtactgaagggaaggacaaagatgtcaccttaagtccagtgaaggctgggcctgccacaaccacttcttcagaaacaagacaaagtgaggtggctttgccttgcaccagcattgaggcagatgaaggcctcataataggaacacattccagaaataatcctcttcatgttggtgcagaagccagtgaatgcactgtttttgctgcagctgaagaaggtggggctgttgtcacagagggatttgctgaaagtgaaaccttcctcacaagcactaaggaaggggaaagtggggagtgtgctgtggctgaatctgaggacagagcagcagacctactggctgtgcatgcagttaaaatcgaagccaatgtaaatagcgttgtgacagaggaaaaggatgatgctgtaaccagtgcaggctctgaagaaaaatgtgatggttctttaagtagagactcagaaatagttgaaggaactattacttttattagtgaagttgaaagtgatggagcagttacaagtgctggaacagagataagagcaggatctataagcagtgaagaggtggatggctcccagggaaatatgatgagaatgggtcccaaaaaagaaacagagggcactgtgacatgtacaggagcagaaggcagaagtgataactttgtgatctgctcagtaactggagcagggccccgggaggaacgcatggttacaggtgcaggtgttgtcctgggagataatgatgcaccaccaggaacaagtgccagccaagaaggagatggttctgtgaatgatggtacagaaggtgagagtgcagtcaccagcacggggataacagaagatggagaggggccagcaagttgcacaggttcagaagatagcagcgaaggctttgctataagttctgaatcggaagaaaatggagagagtgcaatggacagcacagtggccaaagaaggcactaatgtaccattagttgctgctggtccttgtgatgatgaaggcattgtgactagcacaggcgcaaaagaggaagacgaggaaggggaggatgttgtgactagtactggaagaggaaatgaaattgggcatgcttcaacttgtacagggttaggagaagaaagtgaaggggtcttgatttgtgaaagtgcagaaggggacagtcagattggtactgtggtagagcatgtggaagctgaggctggagctgccatcatgaatgcaaatgaaaataatgttgacagcatgagtggcacagagaaaggaagtaaagacacagatatctgctccagtgcaaaagggattgtagaaagcagtgtgaccagtgcagtctcaggaaaggatgaagtgacaccagttccaggaggttgtgagggtcctatgactagtgctgcatctgatcaaagtgacagtcagctcgaaaaagttgaagataccactatttccactggcctggtcgggggtagttacgatgttcttgtatctggtgaagtcccagaatgtgaagttgctcacacatcaccaagtgaaaaagaagatgaggacatcatcacctctgtagaaaatgaagagtgtgatggtctcatggcaactacagccagtggtgatattaccaaccagaatagcttagcagggggtaaaaatcaaggcaaagttttgattatttccaccagtaccacaaatgattacacccctcaggtaagcgcaattacagatgtggaaggaggtctctcagatgctctgagaactgaagaaaatatggaaggtaccagagtaaccacagaagaatttgaggcccccatgcccagtgcagtctcaggagatgacagccaactcactgccagcagaagtgaagagaaagatgagtgtgccatgatttccacaagcataggggaagaattcgaattgcctatctccagtgcaacaaccatcaagtgtgctgaaagtcttcagccggttgctgcagcagtggaagaaagggctacaggtccagtcttgataagcaccgccgactttgaggggcctatgcccagtgcgcccccagaagctgaaagtcctcttgcctcaaccagcaaggaggagaaggatgaatgtgctctcatttccactagcatagcagaagaatgtgaggcttctgtttccggtgtagttgttgaaagtgaaaatgagcgagctggcacagtcatggaagaaaaagacgggagtggcatcatctctacgagctcggtggaagactgtgagggcccagtgtccagtgctgtccctcaagaggaaggcgacccctcagtcacaccagcggaagagatgggtgacaccgccatgatttccacaagcacctctgaagggtgtgaagcagtcatgattggtgctgtcctccaggatgaagatcggctcaccatcacaagagtagaagacttgagcgatgctgccatcatctccaccagcacagcagaatgtatgccaatttccgccagcattgacagacatgaagagaatcagctgactgcagacaacccagaagggaacggtgacctgtcagccacagaagtgagcaagcacaaggtccccatgcccagcctaattgctgagaataactgtcggtgtcctgggccagtcaggggaggcaaagaaccgggtcccgtgttggcagtgagcaccgaggaggggcacaacgggccatcagtccacaagccctctgcagggcaaggccatccaagtgctgtttgtgcggaaaaagaagagaagcatggcaaggagtgccccgaaataggaccatttgcaggaagaggacagaaagagagcactttacacctcataaatgcagaagagaagaatgtattgttgaactcccttcagaaagaagataagagcccagagacagggacagcagggggcagtagcacagcaagttattcagcaggaaggggcttagaggggaatgctaactcacctgcccacctgagaggaccagaacagacgtctgggcagacggctaaggattcctctgtcagcagcattcgctatttggcagcagtaaacaccggtgctataaaagctgatgacatgccacctgttcaagggaccgtggctgagcattcctttcttcctgctgagcagcaggggtctgaagacaacttgaaaaccagtaccaccaaatgtattactggccaagaatcaaaaattgctccttcccacacaatgatccctccagctacttacagtgtagctctgttggctcctaaatgtgagcaggacttgactataaagaatgattatagtggcaaatggactgatcaagcatctgctgagaaaacaggagatgataacagcacaaggaaatcattccctgaggaaggagacataatggttactgtgtcttctgaagaaaatgcttatgtgccttcagaggaagagaaaaatggtgaaattctggcaccaccagaaagtctgtgtgggggaaagccaagtggaatagagatatccagtggtagaaaagacaacgcagaagccataagcggtcacagtgttgaagcagatcctaaagaggaagagaactccagagatttggaagaattacctaaaaccagttctgagacaaatagcactacctcaagggtcatggaagaaaaagatgaatatagcagcagtgaaactactggtgaaaagccagagcagaacgatgatgacaccataaaatctcaggaggatgatggtgaagaaaaaatagtaacaagtgtgcgtcggagaggaagaaaacccaaacgttctctcactgtatcagatgatgctgaatcctcagagccagaaagaaaacgccagaaatcagtttctgatccagtggaggacaagaaagagcaggagtctgatgaggaagaggaagaagaggaagaggacgagccttcaggagccaccacaagatccaccaccagatcagaggctcagagatcaaagacacagctctccccttctatcaagcgcaagagagaagtcagccctcctggggcccgaacaagaggccagcaaagggtggaggaagcccctgtgaaaaaagcgaagcgataatcctgaccactgctgccctaggcttatggaggaacacggtggagaggaaagagacatgccttggtggccataggcttctctttaaccaggaaaaagatatgcatgtgctgtaagtccctagggtgcaagctttttcttgttatgttttaaacagctttataaactattgttg

SEQ ID NO: 124 - DNA, 1519 bp, Homo sapiens
  CDS (131)..(1516)
cggaagtggacgaatttgaatcctgtgggccgttgaatgtggctgctcgcggtcggcgtgccccgacgtacagcgggccgggaaaagtggcactgaggctctggaacttctgcccagctctccttgtaaaatgaatgaaagtaaacctggtgactcacagaaccttgcttgtgttttctgtcgaaaacatgatgactgtcctaataaatacggagaaaagaaaactaaggagaaatggaatctcactgtacattactactgtttgttgatgtcaagtggaatttggcagagaggcaaagaagaagaaggagtttatggttttctaatagaagatatcaggaaggaagtgaatagagcttctaaactggttcaagcaataaatgcgggagtgtttttctttaggtgtacaatatgcaataatagtgacatctttcagaaagagatgttgagaatgggaattcatattcctgaaaaagatgcttcctgggaattagaggaaaacgcttatcaagagcttctgcagcactatgagcgttgtgatgttcgaagatgtcgttgcaaagaagggcgagactataatgcacctgacagcaaatgggaaataaagcgctgtcagtgttgtggttccagtggcacacatttagcctgctcctcattacggtcatgggagcaaaattgggagtgtttggaatgtaggggtattatctacaattcagctctgaaagagaatctttactatgaagctggcaaaatgcttgccatttctttagttcacggtggtccttcacctggtttcttttctaaaaccttgtttaactgccttgtttatggaccagaaaatacccagccaattttagatgatgtttcagactttgatgtggcacagattataatcaggataaatactgcaacaactgtagctgacttaaagtcaataataaatgaatgctataactaccttgagttaattggatgtctcagacttataacgacattaagtgataaatatatgttagtaaaagacatacttggctaccatgtaattcagagagtccacacaccctttgaaagttttaagcagggtctgaaaacccttggtgttttggagaaaattcaggcttatccagaagcattttgtagcatcctgtgtcataaacctgagagtctttctgcaaaaatccttagtgagctttttacagtacacacattacctgatgtgaaagctttggggttttggaacagttacttacaggctgttgaagatggtaaatctacaacaacaatggaagacattcttatttttgcaactggttgcagttccattcctccagctggatttaaacccactccttcaattgagtgtctgcatgtggattttcctgttggaaacaagtgtaataactgtttagcaattcccatcaccaatacatataaagagtttcaagaaaatatggacttcaccataagaaacactctaagactagaaaaggaagaaagttctcattacattggacattaa

SEQ ID NO: 125 - DNA, 3158 bp, Homo sapiens
  CDS (100)..(1812)
ccggctacgggtccccaagcggagcgggaggccggaccggggagccgagcggcggcgtcggcggcgtcggcggcggcggcgacggcggcgggggcggtaatggcggagctggtgcaggggcagagcgctcctgtggggatgaaggccgagggcttcgtggatgccctgcaccgggtccggcagattgctgctaaaattgattcaattcctcacttgaataattccacacctctagtggacccctcagtatatggatacggagtacaaaaacggcccttggatgatggaggtaaccagttaggggccttggtacatcaaaggacggtaataacggaagaattcaaagtgcctgacaaaatggttggatttattatcggcaggggaggtgagcagatttcacggattcaagcagaatctggttgcaaaattcagattgcttcagagagttctgggattccagagaggccctgtgtacttaccggaaccccagaaagtattgaacaagccaaacggctcctgggacagattgtggaccgctgtcgaaatggacctggctttcataatgacatagacagcaacagcacaatccaggagattctcattcccgcatctaaagtgggtctggtcatcggcagaggaggggaaacaatcaagcagttgcaggagcggacaggggtgaagatggtcatgatccaggatggcccattgcccacgggagcagacaagcctcttcgtatcactggagatgcatttaaagtacagcaagcaagagaaatggtactagagattatccgagaaaaagaccaagctgactttcggggtgtacgcggcgatttcaactctcgaatgggaggaggcagtatagaggtatctgtgcctaggtttgctgtggggattgtaataggaagaaacggggaaatgatcaaaaagatccagaatgatgctggtgtgaggattcagtttaaaccagatgatgggattagtccagaaagagctgcccaggtcatgggccctccggatcggtgtcagcatgcagcgcatatcatcagcgagctgattcttacagcccaggaaagagacggctttggaggcctggcagcagccagaggaagaggtcgtggccgtggcgactggagcgtgggagcccctggtggcgtccaggagataacatacacggtgccagccgataagtgtggcctcgtcataggcaaagggggtgagaacatcaaaagcatcaaccagcagtcaggggcgcacgtggagcttcagaggaacccccctcccaacagcgaccccaacctgcggagattcaccatcaggggggttccccagcagatcgaggtggccaggcagctcatagatgagaaagttggcgggaccaatctcggagcacctggagccttcggacagagtccattcagccagccacctgccccacctcatcaaaatacctttcctccaaggagctccgggtgcttcccaaacatggctgccaaggtgaatgggaacccccacagcacccctgtgagtggtcctccggcctttctgacccagggctggggcagcacctaccaggcgtggcagcagcccacacagcaggtcccaagccagcagagccagccgcagagcagccagcccaactacagcaaggcctgggaagactattacaaaaaacagagtcacgccgccagcgctgctcctcaggccagctccccaccggactacacaatggcctgggcagaatattacagacagcaggtcgctttctacggacagacgttagggcaggcgcaggcccacagccaggagcagtaggacagcgtcctcgtggccaactctcccctcaaaatcattgtcaaagaaaacctatttgtaacagaggtttttacatttgcaaaccttttgatgaagaactgttgttttgttctgtgaaacactatatttagattaacggaatttttctaaaaatcaggaaaattagttactaaaaattgctgatcatttttgtttcattatttttgttatttcaaatgtataagctctgggattctttttggagcaatacctacaaagtcaggcaccagaatgtgcctcagagctgtgacatttcaacatgatggttttggtttggtttggttttgtgtcctttttatttgcagttttttctgttgcaacagaaagtggcttggaagtcttaggtggtatgtaacaaattctttttaaaaattttaaagcagtatttaagtattcttaaatgtgtaaattcatttaatgttttacttctaatttcttgtatcttggctgtctggttttattgcatttttaaaaaaactgaactattatgtattgtaatgaatgatgtgaattctgaactgagacagataattgtattgctgtccaacaggggttgggaggggcattttgtagggtttgtataatttctagagttcgaaaggggtaatataaaaatgtgctcgtgtgtttagcctacgtttttctcatgcctccattaccagttgcaattgtgtatctaagacctccaagcttgtttttaaaacaaaacaaaaaacctttctctattatctcagaaatataaatactgttatttttaatattaagaaattcaatataacttttaacacacactgtggaacattaaaccgtataaaaatgtagttataactatttttaattccaaggtgttgtttgcttttttcttttaaatattttcttaatattttgtcagattaactagatgaataaataaatctagtattaaccgcattatgaattaaataattttgatttaatgaaagggataatatgatttccagtgtttactgtagtgtatcttgtacagataacatgtatttttaaaggaaaaaaaacggaattgaagctattttttcttgcatttctaattgacctgagggacattccgtttgaaatgtactgaagttacagtttctggttttttctccttatttttcttataatgcttgaaatgtctaactattaaaaaagacaattggaaaatgttatgcatggggtttttaagaaaacaaagtgttctttttatttgactgacaattcattttacactctatataataaaatctccacaaggcatcttgtgggcaaagtcaaaaaaaaaaaaa

SEQ ID NO: 126 - DNA, 3236 bp, Homo sapiens
  CDS (133)..(2880)
tttgaaaatgtgttttttgaggtggaatacccaactgacccctcatctctcctctctctctgctgccctgcagtgctacagttgaaactccagcagcgccggacccgggaagaactggtgagccaagggatcatgccgcctttgaaaagtccagccgcatttcatgagcagagaaggagcttggagcgggccaggacagaggactatctcaaacggaagattcgttcccggccggagagatcggagctggtcaggatgcacattttggaagagacctcggctgagccatccctccaggccaagcagctgaagctgaagagagccagactagccgatgacctcaatgagaagattgcacagaggcctggccccatggagctggtggagaagaacatccttcctgttgagtccagcctgaaggaagccatcattgtgggccaggtgaactatcccaaagtagcagacagctcttccttcgatgaggacagcagcgatgccttatcccccgagcagcctgccagccatgagtcccagggttctgtgccgtcacccctggaggcccgagtcagcgaaccactgctcagtgccacctctgcatcccccacccaggttgtgtctcaacttccgatgggccgggattccagagaaatgcttttcctggcagagcagcctcctctgcctcccccacctctgctgcctcccagcctcaccaatggaaccactatccccactgccaagtccacccccacactcattaagcaaagccaacccaagtctgccagtgagaagtcacagcgcagcaagaaggccaaggagctgaagccaaaggtgaagaagctcaagtaccaccagtacatccccccggaccagaagcaggacaggggggcaccccccatggactcatcctacgccaagatcctgcagcagcagcagctcttcctccagctgcagatcctcaaccagcagcagcagcagcaccacaactaccaggccatcctgcctgccccgccaaagtcagcaggcgaggccctgggaagcagcgggacccccccagtacgcagcctctccactaccaatagcagctccagctcgggcgcccctgggccctgtgggctggcacgtcagaacagcacctcactgactggcaagccgggagccctgccggccaacctggacgacatgaaggtggcagagctgaagcaggagctgaagttgcgatcactgcctgtctcgggcaccaaaactgagctgattgagcgccttcgagcctatcaagaccaaatcagccctgtgccaggagcccccaaggcccctgccgccacctctatcctgcacaaggctggcgaggtggtggtagccttcccagcggcccggctgagcacggggccagccctggtggcagcaggcctggctccagctgaggtggtggtggccacggtggccagcagtggggtggtgaagtttggcagcacgggctccacgccccccgtgtctcccaccccctcggagcgctcactgctcagcacgggcgatgaaaactccacccccggggacacctttggtgagatggtgacatcacctctgacgcagctgaccctgcaggcctcgccactgcagatcctcgtgaaggaggagggcccccgggccgggtcctgttgcctgagccctggggggcgggcggagctagaggggcgcgacaaggaccagatgctgcaggagaaagacaagcagatcgaggcgctgacgcgcatgctccggcagaagcagcagctggtggagcggctcaagctgcagctggagcaggagaagcgagcccagcagcccgcccccgcccccgcccccctcggcacccccgtgaagcaggagaacagcttctccagctgccagctgagccagcagcccctgggccccgctcacccattcaaccccagcctggcggccccagccaccaaccacatagacccttgtgctgtggccccggggcccccgtccgtggtggtgaagcaggaagccttgcagcctgagcccgagccggtccccgccccccagttgcttctggggcctcagggccccagcctcatcaagggggttgcacctcccaccctcatcaccgactccacagggacccaccttgtcctcaccgtgaccaataagaatgcagacagccctggcctgtccagtgggagcccccaggagatggacctggagcacccactgcagcccctctttgggacccccacttctctgctgaagaaggaaccacctggctatgaggaagccatgagccagcagcccaaacagcaggaaaatggttcctcaagccagcagatggacgacctgtttgacattctcattcagagcggagaaatttcagcagatttcaaggagccgccatccctgccagggaaggagaagccatccccgaagacagtctgtgggtcccccctggcagcacagccatcaccttctgctgagctcccccaggctgccccacctcctccaggctcaccctccctccctggacgcctggaggacttcctggagagcagcacggggctgcccctgctgaccagtgggcatgacgggccagagcccctttccctcattgacgacctccatagccagatgctgagcagcactgccatcctggaccaccccccgtcacccatggacacctcggaattgcactttgttcctgagcccagcagcaccatgggcctggacctggctgatggccacctggacagcatggactggctggagctgtcgtcaggtggtcccgtgctgagcctagcccccctcagcaccacagcccccagcctcttctccacagacttcctcgatggccatgatttgcagctgcactgggattcctgcttgtagctctctggctcaagacggggtggggaaggggctgggagccagggtactccaatgcgtggctctcctgcgtgattcggcctctccacatggttgtgagtcttgacaatcacagcccctgctttttcccttccctgggaggctagaacagagaagcccttactcctggttcagtgccacgcagggcagaggagagcagctgtcaagaagcagccctggctctcacgctggggttttggacacacggtcagggtcagggccatttcagcttgacctccttttttgaggtcagggggcactgtctgtctggctacaatttggctaaggtaggtgaagcctggccaggcgggaggctt

SEQ ID NO: 127 - DNA, 537 bp, Homo sapiens
  CDS (242)..(472)
cttttgagccccgccccctccattggcgcgccctcgccatcccccgccctggcacgcgctctgcgcatgcgtacgctcgctggccccgccccctagcgccgcggtcgacgccatttcgccgattcctccatgcgagttgctgtgcgtttctctgttgtctcggtagaaggccagagtcacacacggtcctaagagctgggcaccaggaagcgaaggctgatctgaagaagacacttgaatcatgggtgacgttaaaaattttctgtatgcctggtgtggcaaaaggaagatgaccccatcctatgaaattagagcagtggggaacaaaaacaggcagaaattcatgtgtgaggttcaggtggaaggttataattacactggcatgggaaattccaccaataaaaaagatgcacaaagcaatgctgccagagactttgttaactattcgggtcgaataaatgaaatagacatgtgagaaagatcaccttttggggaaccctgttctgccgcgttactgttactactggcagtagggca

SEQ ID NO: 128 - DNA, 1203 bp, Homo sapiens
  CDS (43)..(798)
gtccagtgcggtggaattcctctccgcatcaaagtcatctccatgggcaacgccgaagtggggaaaagctgtattataaagcgatactgtgagaaaagattcgtgtctaaatacctggcaacaattggaattgactatggagtcacaaaggtacacgtcagagacagagaaatcaaagttaacatctttgatatggctggacatcccttcttctatgaggttcgaaatgagttttacaaggacacacagggtgtgatactggtctatgatgttgggcagaaagactcctttgacgcccttgatgcgtggctggcagaaatgaagcaagagcttggacctcatggaaacatggaaaatattatatttgtagtttgtgccaacaagattgattgtaccaaacatcgctgtgtagatgaaagtgaaggacgtctttgggctgaaagcaaagggttcctgtactttgaaacttcagcacaaactggagaaggcattaatgagatgttccagaccttttatatatccatagttgatttatgtgaaaatggcgggaaacgccctaccaccaatagcagtgctagtttcaccaaagaacaagcagatgccattcgcagaattcgaaatagtaaagacagttgggacatgctgggagtcaaacctggggcctcaagggatgaagtcaataaagcgtatcggaaacttgctgtgcttcttcaccctgacaaatgtgtagcacctggcagtgaagatgccttcaaagcagttgtgaatgctcggacagccctcctgaaaaacatcaagtagaaagtacagaaaaaagccacatgtgggactcaaatgcaaacagactttccctagaggtgaaataaccaacgtggagttttccttcccagaatctcactgctcttttcattcatgtgttgtcatttgtatatcagtaattcaggtacccatttcatagacattttactgagaaatgacctgcatttgtatgaagtgaactgagcgtcacaccctgtacttcatttcatatttctagataattctgaatttttttctcattcgtcagctctgtaattatagtatcacttagacatttcacttggggaaatccacaaggttcctggaggagggaagagaggacaagaggaccctttcactttttcttttttacggaattcatcatcagagaagaaaaaaaaaaaa

SEQ ID NO: 129 - DNA, 746 bp, Homo sapiens
  CDS (235)..(423)
gcacaggtctggggctttttgcaggcgggcctggggtctcagtggaggggacaaaggcaagcaaaagcccatgtccaggagccctgggtgtccccacaggctcgcctctgagagcctctttggggtgagcagccttgtattggccacaggtgcactaaattgactgtgaatcccaaacctccccagaccaggcaggccgcctgcccccacccagaaccttccggtttgccctgtatggaaagccactctcggaaatccctctttcctgagtcagcaatcgtggcaaggggacatgtgttccaacagcggctggggagtggacctctctgtcccttgcccaccttaagccccaaatccggaccccctctgacatcactggcattgcacctgggtgtgcccccctccccacgctatggacccagataggaggggttaggcatgggggaggcacagaatgctggagagatgcgtcctggtgaacgtggggcagcccctcccacgacccccaccagactgccttaggttttgtcagccccactccctttccttcccctctgcctcccacccactctgggggtccacatcaagatagctgggcccagtgtggaagcccaacgtgtctgttctagcagaaaggacacaagcctggtgttctggagacctcggctcaagtctttgccctgctgccgacgcattgtgtcaccttgggcaaggatttcgcatctccaggcctcagtttccccatt

SEQ ID NO: 130 - DNA, 4895 bp, Homo sapiens
  CDS (1)..(4782)
atggggtttcaccatgttggccacgctggtctcgaacacctgacctcaggtgacaggctgggaaggagatcctcaagcaagcgggctctcaaagccgaggggaccccaggcaggcgcggagctcagcgaagccagaaggagcgcgccgggggcagcccaagcccggggtctccccggaggaagcaaacagggcgcaggagacacagagaagagctgggggagcaggagcggggcgaggcagagaggacctgcgagggcaggagaaagcgcgacgagagggcctccttccaggagcggacagcagccccaaagagggaaaaggagattccgaggagggaggagaagtcgaagcggcagaagaaacccaggtcatcctccttggcctccagtgcctctggtggggagtccctgtccgaggaggaactggcccggatcctggagcaggtggaagaaaaaaagaagctcattgccaccatgcggagcaagccctggcccatggcgaagaagctgacagagctcagggaggcccaggaatttgtggagaagtatgaaggtgccttgggaaaggggaaaggcaagcaactatatgcctacaagatgctgatggccaagaaatgggtcaaatttaagagagactttgataatttcaagactcaatgtatcccctgggaaatgaagatcaaggacattgaaagtcactttggttcttcagtggcatcgtatttcatctttctccgatggatgtatggagttaaccttgtcctttttggcttaatatttggtctagtcataatcccagaggatgtctacgtgatccctgaggaaccctcagttatgctgcaggagctggctggcaaggccccactggatgacaagtttatgtacttctcttccaacactggatcctacggtctaggttttgaccaaggctacaattatcttgaggctgaactgaagaagatccgcttccaagctcactcacatggctactggcagatctcagaagatacaatttcaagcttactcacgtggcttctggcaggcctcagaaaatctgcttccaaccttacttatgtggctgttcccaaggttcagggctatatcaagtactctgcactcttctatggctactacaacaaccagaggaccatcgggtggctgaggtaccggctgcctatggcttactttatggtgggggtcagcgtgttcggctacagcctgattattgtcattcgatcgatggccagcaatacccaaggaagcacaggcgaaggggagagtgacaacttcacattcagcttcaagatgttcaccagctgggactacctgatcgggaattcagagacagctgataacaaatatgcatccatcaccaccagcttcaaggaatcaatagtggatgaacaagagagtaacaaagaagaaaatatccatctgacaagatttcttcgtgtcctggccaactttctcatcatctgctgtttgtgtggaagtgggtacctcatttactttgtggttaagcgatctcagcaattctccaaaatgcagaatgtcagctggtatgaaaggaatgaggtagagatcgtgatgtccctgcttggaatgttttgtccccctctgtttgaaaccatcgctgccctggagaattaccacccacgcactggactgaagtggcagctgggacgcatctttgcactcttcctggggaacctctacacatttctcttggccctgatggatgatgtccacctcaagcttgctaatgaagagacaataaagaacatcactcactggactctgtttaactattacaactcttctggttggaacgagagtgtcccccgaccacccctgcaccctgcagatgtgccccggggttcttgctgggagacagctgtgggcattgaattcatgaggctgacggtgtctgacatgctggtaacgtacatcaccatcctgctgggggacttcctacgggcttgttttgtgcggttcatgaactactgctggtgctgggacttggaggctggatttccttcatatgctgagtttgatattagtggaaatgtgctgggtttgatcttcaaccaaggaatgatctggatgggctccttctatgctccaggcctggtgggcattaatgtgctgcgcctgctgacctccatgtacttccagtgctgggcggtgatgagcagcaacgtaccccatgaacgcgtgttcaaagcctcccgatccaacaacttctacatgggcctcctgctgctggtgctcttcctcagcctcctgccggtggcctacaccatcatgtccctcccaccctcctttgactgcgggccgttcagtgggaaaaacagaatgtacgatgtcctccaagagaccattgaaaacgatttcccaaccttcctgggcaagatctttgctttcctcgccaatccaggcctgatcatcccagccatcctgctgatgttcttggccatttactacctgaactcagtttccaaaagcctttcccgagctaatgcccagctgaggaagaaaatccaagtgctccgtgaagttgagaagagccacaaatctgtaaaaggcaaagccacagccagagattcagaggacacacctaaaagcagctccaaaaatgccacccagctccaactcaccaaggaagagaccactcctccctctgccagccaaagccaggccatggacaagaaggcgcagggccctgggacctccaattctgccagcaggaccacactgcctgcctctggacaccttcctatatctcggccccctggaatcggaccagattctggccacgccccatctcagactcatccgtggagacagagcctgggcctgggcctgggcctgggcctgggcctgggcctgcgcctgcgcctgccctgggaacgggttccggcagacgctgaggttgcgttgacgctcgcgccccggctcccgttccaggtgctgttgcacgtgctgtttgagcacgcggtcggctacgcgctgctggcgctgaaggaagtggaggagatcagtctgctgcagcccgcagcatgcacagcgcgctcccacgtggccggccgaccggtggaggagtccgtgctcaacctgggcaaattccacagcatcgttcgtctggtggccttttgtccctttgcctcatcccaggttgccttggaaaatgccaacgccgtgtctgaaggggttgttcatgaggacctccgcctgctcttggagacccacctgccgtccaaaaagaagaaagtactcttgggagttggggatcccaagattggtgccgcaatacaggaggagttagggtacaactgccagactggaggagtcatagctgagatcctgcgaggagttcgtctgcacttccacaatctggtgaagggtctgaccgatctgtcagcttgtaaagcacagctggggctgggacacagctattcccgtgccaaagttaagtttaatgtgaaccgggtggacaatatgatcatccagtccattagcctcctggaccagctggataaggacatcaataccttctctatgcgtgtcagggagtggtacgggtatcactttccggagctggtgaagatcatcaacgacaatgccacatactgccgtcttgcccagtttattggaaaccgaagggaactgaatgaggacaagctggagaagctggaggagctgacaatggatggggccaaggctaaggctattctggatgcctcacggtcctccatgggcatggacatatctgccattgacttgataaacatcgagagcttctccagtcgtgtggtgtctttatctgaataccgccagagcctacacacttacctgcgctccaagatgagccaagtagcccccagcctgtcagccctaattggggaagcggtaggtgcacgtctcatcgcacatgctggcagcctcaccaacctggccaagtatccagcatccacagtgcagatccttggggctgaaaaggccctgttcagagccctgaagacaaggggtaacaccccaaaatatggactcattttccactccaccttcattggccgagcagctgccaagaacaaaggccgcatctcccgatacctggcaaacaaatgcagtattgcctcacgaatcgattgcttctctgaggtgcccacgagtgtattcggggagaagcttcgagaacaagttgaagagcgactgtccttctatgagactggagagataccacgaaagaatctggatgtcatgaaggaagcaatggttcaggcagaggaagcagctgctgagattactaggaagctggagaaacaggagaagaaacgcttaaagaaggaaaagaaacggctggctgcacttgccctcgcgtcttcagaaaacagcagtagtactccagaggagtgtgaggagatgagtgaaaaacccaaaaagaagaaaaagcaaaagccccaggaggttcctcaggagaatggaatggaagacccatctatctctttctccaaacccaagaaaaagaaatctttttccaaggaggagttgatgagtagcgatcttgaagagaccgctggcagcaccagtattcccaagaggaagaagtctacacccaaggaggaaacagttaatgaccctgaggaggcaggccacagaagtggctccaagaaaaagaggaaattctccaaagaggagccggtcagcagtgggcctgaagaggcggctggcaagagcagctccaagaagaagaaaaagttccataaagcatcccaggaagattagaatgcaaatggacattctctgggaggtggggcataccatagcccaaggtgacatttcccaccctgtgccgtgttccccaataaaaacaaattcacaagaaaaaaaaaaaa

SEQ ID NO: 131 - DNA, 2338 bp, Homo sapiens
  CDS (406)..(1686)
gacaccggggaggcagtgtatcgctcccgggaccccgtgcgcaacttgcgcctccgagtccacctgcaaagaatcacatcaagcaactttcttcattatcagcctgctgccgagctcgggaaggacctcatagacttggccacttttaggcctcagccaactgccagtggacaccgcccagaggaagacgaagaggaggagattgtgattgggtggcaggagaagctctttagccagtttgaagtagatctgtaccaaaatgaaacagcctgtcagagtcctttggattatcagtaccgtcaggagatcctgaagctggagaattcgggtggcaagaaaaaccgacgaatctttacctacactgactctgatagatacaccaatttggaggagcactgtcagagaatgaccactgcagccagcgaggtgccttcattcttggtcgagcgaatggcaaatgtcaggcgtcgccggcaggacaggcgagggatggagggcggcatcctcaagtcacgcatcgtcacctgggagccctcagaagagtttgtcaggaacaaccacgtcattaacacccctcttcagacaatgcacatcatggcagacctggggccctataaaaagcttggctataagaagtatgaacatgtcctgtgtactctgaaggtggatagcaatggtgtgatcacagtaaagcctgacttcacgggcctcaaaggaccctacaggattgagacggagggggagaagcaggagctgtggaaatatacgatcgacaatgtttccccccacgcacagccggaggaggaggagcgggaacggcgagtgttcaaggatctttatggccggcacaaggagtatctcagcagcctcgtaggcaccgactttgagatgactgtcccaggtgccctccggctctttgtaaatggagaggtcgtttcagcccaaggctatgagtatgacaatctctacgtccacttctttgtagaattgccaactgctcgcgagcttactatatttggtctttggctttcagactggtcaagcccagcattccagcagctctcaggagtaacacagacctgcaccaccaagtccctggcaatggacaaggtggctcacttctcctacccattcacgtttgaagccttcttcctccatgaggatgaatcttctgatgcactcccggagtggcctgtgctctactgtgaggtcctctcgctggacttctggcagaggtaccgtgtggaaggctatggggctgtggtgctgcctgccactccaggctcacacaccctgacagtctccacgtggagacctgtggagcttggcacggtggctgagctgaggaggtttttcattggcggttctctggaactggaggacctctcctatgtacggataccaggatccttcaagggggaacgcctgagccgctttggactccgcacagagaccacaggcactgtcaccttccgcttgcactgtctgcagcagtccagggccttcatggaatcgagctcccttcagaaaaggatgcggagtgtgttggaccgtctggaagggttcagccagcagagttccattcacaatgtgctagaggccttccgtcgagcccggcgccgcatgcaggaggcccgggaaagcctcccgcaggacctagtgagcccctctggaaccctggtctcctagctcacagcagccctggcccacagtgcaagaggacaagatgggggatatctgaggccagtgctctcctgcctcttcgtctttctgattagagaccacgttggtctgctgagaaccagaaaagctgggaaattcccggctggcccctctgcctagccttctgcagggtcttctccctaccctgtggaaataaagccagagaccctgtggccccccctttatatttgcagccactgtcaatgggcatcacagcaaggcaggctttttgatctgaagctgtttggggtgaccccatagtgagtctggccttgactcacttttctggcttgtctcacagtagcaggggatctgctgttctccaccctttaaaaatggagcctttcatcttccaagaccaaagaaggaaggaaggtggacggtgagagggtcttaaatccccagcctgtgagtctcagcctctttccagggaagcctcattctactgcttggggcttgctgaggttgagatatgagttatttctgagtaagtgaaggctgaaggcagtgctgagtcctttctgctagctgggtggtatcttttactgtgtttttttgtttgtttgtttttttgttttttgttacataaaccccttttattttgaaaaaaaaaaaa

SEQ ID NO: 132 - DNA, 1463 bp, Homo sapiens
  CDS (431)..(1297)
cgtggcggagaccgtctggagcactgacaccggggaggcagtgtatcgctcccgggaccccgtgcgcaacttgcgcctccgagtccacctgcaaagaatcacatcaagcaactttcttcattatcagcctgctgccgagctcgggaaggacctcatagacttggccacttttaggcctcagccaactgccagtggacaccgcccagaggaagacgaagaggaggagattgtgattgggtggcaggagaagctctttagccagtttgaagtagatctgtaccaaaatgaaacagcctgtcagagtcctttggattatcagtaccgtcaggagatcctgaagctggagaattcgggtggcaagaaaaaccgacgaatctttacctacactgactctgatagatacaccaatttggaggagcactgtcagagaatgaccactgcagccagcgaggtgccttcattcttggtcgagcgaatggcaaatgtcaggcgtcgccggcaggacaggcgagggatggagggcggcatcctcaagtcacgcatcgtcacctgggagccctcagaagagtttgtcaggaacaaccacgtcattaacacccctcttcagacaatgcacatcatggcagacctggggccctataaaaagcttggctataagaagtatgaacatgtcctgtgtactctgaaggtggatagcaatggtgtgatcacagtaaagcctgacttcacgggcctcaaaggaccctacaggattgagacggagggggagaagcaggagctgtggaaatatacgatcgacaatgtttccccccacgcacagccggaggaggaggagcgggaacggcgagtgttcaaggatctttatggccggcacaaggagtatctcagcagcctcgtaggcaccgactttgagatgactgtcccaggtgccctccggctctttgtaaatggagaggtcgtttcagcccaaggctatgagtatgacaatctctacgtccacttctttgtagaattgccaactgctcactggtcaagcccagcattccagcagctctcaggagtaacacagacctgcaccaccaagtccctggcaatggacaaggtggctcacttctcctacccattcacgtttgaagccttcttcctccatgaggatgaatcttctgatgcactcccggagtggcctgtgctctactgtgaggtcctctcgctggacttctggcagaggtaccgtgtggaaggctatggggctgtggtgctgcctgccactccagcgacaatgacgtggccttggcactgacttcctgacagtctctccatgtgcttcatgctcctctgattggactcagggtgagaagctgtatggcaaaattggctcatagcatatgtgtattgaatgaatcagcattcagtttggaataaaagcatctgtcttttactgtgaaaaaaaaaaaaaaaaaaaa

SEQ ID NO: 133 - DNA, 1862 bp, Homo sapiens
  CDS (4)..(1434)
gacatgacgcccgaggacccagaggaaacccagccgcttctggggcctcctggcggcagcgcgccccgcggccgccgcgtcttcctcgccgccttcgccgctgccctgggcccactcagcttcggcttcgcgctcggctacagctccccggccatccctagcctgcagcgcgccgcgcccccggccccgcgcctggacgacgccgccgcctcctggttcggggctgtcgtgaccctgggtgccgcggcggggggagtgctgggcggctggctggtggaccgcgccgggcgcaagctgagcctcttgctgtgctccgtgcccttcgtggccggctttgccgtcatcaccgcggcccaggacgtgtggatgctgctggggggccgcctcctcaccggcctggcctgcggtgttgcctccctagtggccccggtctacatctccgaaatcgcctacccagcagtccgggggttgctcggctcctgtgtgcagctaatggtcgtcgtcggcatcctcctggcctacctggcaggctgggtgctggagtggcgctggctggctgtgctgggctgcgtgcccccctccctcatgctgcttctcatgtgcttcatgcccgagaccccgcgcttcctgctgactcagcacaggcgccaggaggccatggccgccctgcggttcctgtggggctccgagcagggctgggaagacccccccatcggggctgagcagagctttcacctggccctgctgcggcagcccggcatctacaagcccttcatcatcggtgtctccctgatggccttccagcagctgtcgggggtcaacgccgtcatgttctatgcagagaccatctttgaagaggccaagttcaaggacagcagcctggcctcggtcgtcgtgggtgtcatccaggtgctgttcacagctgtggcggctctcatcatggacagagcagggcggaggctgctcctggtcttgtcaggtgtggtcatggtgttcagcacgagtgccttcggcgcctacttcaagctgacccagggtggccctggcaactcctcgcacgtggccatctcggcgcctgtctctgcacagcctgttgatgccagcgtggggctggcctggctggccgtgggcagcatgtgcctcttcatcgccggctttgcggtgggctgggggcccatcccctggctcctcatgtcagagatcttccctctgcatgtcaagggcgtggcgacaggcatctgcgtcctcaccaactggctcatggcctttctcgtgaccaaggagttcagcagcctcatggaggtcctcaggccctatggagccttctggcttgcctccgctttctgcatcttcagtgtccttttcactttgttctgtgtccctgaaactaaaggaaagactctggaacaaatcacagcccattttgaggggcgatgacagccactcactaggggatggagcaagcctgtgactccaagctgggcccaagcccagagcccctgcctgccccaggggagccagaatccagccccttggagccttggtctgcagggtccctccttcctgtcatgctccctccagcccatgacccggggctaggaggctcactgcctcctgttccagctcctgctgctgctctgaggactcaggaacaccttcgagctttgcagacctgcggtcagccctccatgcgcaagactaaagcagcggaagaggaggtgggcctctaggatctttgtcttctggctggaggtgcttttggaggttgggtgctgggcattcggtcgctcctctcacgcggctgccttatcgggaaggaaatttgtttgccaaataaagactgacacagaaaaaaaaaaaaa

SEQ ID NO: 134 - DNA, 1655 bp, Homo sapiens
  CDS (4)..(1227)
gacatgacgcccgaggacccagaggaaacccagccgcttctggggcctcctggcggcagcgcgccccgcggccgccgcgtcttcctcgccgccttcgccgctgccctgggcccactcagcttcggcttcgcgctcggctacagctccccggccatccctagcctgcagcgcgccgcgcccccggccccgcgcctggacgacgccgccgcctcctggttcggggtctacatctccgaaatcgcctacccagcagtccgggggttgctcggctcctgtgtgcagctaatggtcgtcgtcggcatcctcctggcctacctggcaggctgggtgctggagtggcgctggctggctgtgctgggctgcgtgcccccctccctcatgctgcttctcatgtgcttcatgcccgagaccccgcgcttcctgctgactcagcacaggcgccaggaggccatggccgccctgcggttcctgtggggctccgagcagggctgggaagacccccccatcggggctgagcagagctttcacctggccctgctgcggcagcccggcatctacaagcccttcatcatcggtgtctccctgatggccttccagcagctgtcgggggtcaacgccgtcatgttctatgcagagaccatctttgaagaggccaagttcaaggacagcagcctggcctcggtcgtcgtgggtgtcatccaggtgctgttcacagctgtggcggctctcatcatggacagagcagggcggaggctgctcctggtcttgtcaggtgtggtcatggtgttcagcacgagtgccttcggcgcctacttcaagctgacccagggtggccctggcaactcctcgcacgtggccatctcggcgcctgtctctgcacagcctgttgatgccagcgtggggctggcctggctggccgtgggcagcatgtgcctcttcatcgccggctttgcggtgggctgggggcccatcccctggctcctcatgtcagagatcttccctctgcatgtcaagggcgtggcgacaggcatctgcgtcctcaccaactggctcatggcctttctcgtgaccaaggagttcagcagcctcatggaggtcctcaggccctatggagccttctggcttgcctccgctttctgcatcttcagtgtccttttcactttgttctgtgtccctgaaactaaaggaaagactctggaacaaatcacagcccattttgaggggcgatgacagccactcactaggggatggagcaagcctgtgactccaagctgggcccaagcccagagcccctgcctgccccaggggagccagaatccagccccttggagccttggtctgcagggtccctccttcctgtcatgctccctccagcccatgacccggggctaggaggctcactgcctcctgttccagctcctgctgctgctctgaggactcaggaacaccttcgagctttgcagacctgcggtcagccctccatgcgcaagactaaagcagcggaagaggaggtgggcctctaggatctttgtcttctggctggaggtgcttttggaggttgggtgctgggcattcggtcgctcctctcacgcggctgccttatcgggaaggaaatttgtttgccaaataaagactgacacagaaaaaaaaaaaaa

SEQ ID NO: 135 - DNA, 1218 bp, Homo sapiens
  CDS (205)..(921)
gacgcgggccgagccggaagtggagtgtgctgcggcgcgagctgggccggcgggcgtggttcgagagcgcgcagagtccagactggcggcagggcccgaggggccgacccgcagcgtccctggtctctccagccctcactcggaaccgcactgacaataccctcccctcccttgggctggacccctctctacagctaggagccaatggcagaagacaaaaccaaaccgagtgagttggaccaagggaagtatgatgctgatgacaacgtgaagatcatctgcctgggagacagcgcagtgggcaaatccaaactcatggagagatttctcatggatggctttcagccacagcagctgtccacgtacgccctgaccctgtacaagcacacagccacggtagatggcaagaccatccttgtggacttttgggacacggcaggccaggagcggttccagagcatgcatgcctcctactaccacaaggcccacgcctgcatcatggtgtttgatgtacagaggaaagtcacctataggaacctgagcacctggtatacagagcttcgggagttcaggccagagatcccatgcatcgtggtggccaataaaattgatgcagacataaacgtgacccaaaaaagcttcaattttgccaagaagttctccctgcccctgtatttcgtctcggctgctgatggtaccaatgttgtgaaggtgtggttgactgcagaggtagctagcaagctcttcaatgatgcaattcgattagctgtgtcttacaaacagaactcccaggacttcatggatgagatttttcaggagctcgagaacttcagcttggagcaggaagaggaggacgtgccagaccaggaacagagcagcagcatcgagaccccatcagaggaggtggcctctccccacagctgaggggctggggctaggggtgggtggagcccttttaaaatacccttcccttcaacaactctccagctctgaatggagaaactctctaggccatcccctcttctacctcctgcaacccacccatcctattagcctcccacattctaggcccgtgatacagggatgaggtcagcaccagcaaactctggactggtggaagaattccccaccagatctccttgaagcagaagtagggatcagcatcattaacaccttccccaccccctccccgcaggcagacagtgaagagaatcagaa

SEQ ID NO: 136 - DNA, 1842 bp, Homo sapiens
  CDS (934)..(1839)
tcagccagctggactcagtttagacgatcccaattttgttgcaacatccaaagcttcataatcaggagccagtcgaacatatgccttgttctctttatcaggaaaaatcagggtggtgaccttggccacatcactgtcatagagcttcttcacagcctgtttgatctggtgcttgttggctttaacatccacgaagaacacaagcatgttgttttcttctatcttcttccggcccattgatagcatagtggccaagcttgtttctcctgggggtgctcttccgaggatatctgggctgcctccggagtcgcagtgtcttgggccgcctgaaggtgagtgacatgcggatcttcttttttgcgtgtggctgcggacacctttcaacactgccttcttggcctttaaagccttcactttggcttcggctttaggaggagcaggagcttccttcgctttcggtgccgtcttcctcaatggcctgcagccacgtctccccaggtcagtcttaaggacaacgaaactctggtcttcactgtggacatgccacactaccaggtgctccaaagccatggtgacccatcctcaggcgggcggcacccgctgaagcctcagtaccacacccacagccaggagccccagtcccgcactcggccgcatgcgcactcctgcggccctcccgccaggcgccgctgggcagccagcgaccggcggggtccttcacgttcggccgggcagcctccctcggggtccttgcgcggttgcgtagcagctgcgaggacgcggggcgagccggaagtggagtcgctgcggcgcgagctgggccggcgggcgtggttcgagagcgcgcagagtccagactggcggcagggcccgaaggggccgacccgcagcgtccctggtctctccagccctcactcggaaccgcacgagccaatggcagaagacaaaaccaaaccgagtgagttggaccaagggaagtatgatgctgatgacaacgtgaagatcatctgcctgggagacagcgcagtgggcaaatccaaactcatggagagatttctcatggatggcttgtatccttcaaggtttgaagtactccttgttcctgtgggtcttcccacgctcatgtatcagtgtcccactgcccacccctttgtaccagcagcccaggaacaggaaggaggattggacttcgatggccaggacacactctcatctcctcccacccctcacccttccatggagcttgtaccagtgtgcagtcagccacagcagctgtccacgtacgccctgaccctgtacaagcacacagccacggtagatggcaagaccatccttgtggacttttgggacacggcaggccaggagcggttccagagcatgcatgcctcctactaccacaaggcccatgcctgcatcatggtgtttgatatacagaggaaagtcacctataggaacctgagcacctggtatacagagcttcgggagttcaggccagagatcccatgcatcgtggtggccaataaaattgatgcagacataaacgtgacccaaaaaagcttcaattttgccaagaagttctccctgcccctgtatttcgtctcggctgctgatggtaccaatgttgtgaaggtgtggttgactgcagaggtagctagcaagctcttcaatgatgcaattcgattagctgtgtcttacaaacagaactcccaggacttcatggatgagatttttcaggagctcgagaacttcagcttggagcaggaagaggaggacgtgccagaccaggaacagagcagcagcatcgagaccccatcagaggaggtggcctctccccacagctga

SEQ ID NO: 137 - DNA, 510 bp, Homo sapiens
  CDS (17)..(319)
ctacagctaggagccaatggcagaagacttaaccaaaccgagtgagttggaccaagggaagtatgatgctgatgacaacgtgaagatcatttgcctgggagacagcgcagtgggcaaatccaaactcatggagagatttctcatggatggctttcagccacagcagctgtccacgtacgccctgaccctgtacaagcacacagccacggtagatggcaagaccatccttgtggacttttgggacacggcaggccaggagcggttccagagcatgcatgcctcctactaccacaaggcccatgcctgcatcatgcagacataaacgtgacccaaaaaagcttcaattttgccaagaagttctccctgcccctgtatttcgtctcggctgctgatggtaccaatgttgtgaagctcttcaatgatgcaattcgattagctgtgtcttacaaacagaactcccaggacttcatggatgagatttttcaggagctcgagaacttcagcttggag

SEQ ID NO: 138 - DNA, 2440 bp, Homo sapiens
  CDS (1018)..(1533)
gccagagggccggggccggggccgcgacccgcatcgggatcgcacccgctcccgctcccgctcgcggtcccctttgtcgcccaggtcccgccgcggctctgcgcgggagcgcagagaggccccagagcgcccgagcctggaggacacagagccgtcggattccggggacgagatgatggacccggccagcttggaggcggaggccgaccaaggcctgtgccgccagatccgccatcagtaccgggcgctcatcaactccgtccaacgtaaggcggcgcctccgggcggcgcgggcccggacgggccgctgtccccgccctgcgccgggcgcggggggagggcaccggaggcaggtgccgggcggaggcccggcgcggcgttagtagagacgcgccgggtgccagcccctcgccgcaccttaaattgttgacaaagtgctcccactttgtggctggagccgtacgaccttggcgcgggtccccgagtggcgggctggaaaagctggaggccagagccgttcgcggactcgcccgagcccagccagccagtggggagagcatgacgcggacctcgcgtgctatgattgcgccccgcagtgctcgggcgtggctcccagcctcgcagcggcagctgcagctggcagcgaacgcgagagctggcaatgcacgttctcggaccccacccggacccgcgtttttttaatctctgggtggctccgcgcaactgtggagtggccctccaggtgatggtgtgtgttgcttgcaaagcttgagaaccactcagttatggtgcactcaaaggctgcagccggagtccagccctttggtttaagaaaaccgtgaggacatactgaatgccggtgacaaattaacagaggtccttgaagaggctaacactctgtttaatgaagtgtcccgagcaagagaagcagtcctggatgcccactttcttgttttggcttcagatttgggcaaagagaaagcaaagcagctgcgctcagacctgagctcctttgacatgttaagatatgttgaaactctactcacacatatgggtgtaaatccgctagaagctgaagaactcatccgtgatgaagatagtcctgattttgaattcatagtctatgactcctggaagataacaggcagaacagcagaaaacacctttaataaaacccatacattccactttctgttgggttcaatatacggagagtgccctgtgccaaagccacgagttgatcgtccaagaaaagttcctgtgatacaagaggagagggcaatgcctgcccagttaagaagaatggaagaatctcatcaagaagcaacagagaaagaagtagaaagaatcttgggattgttgcagacatattttcgagaagatcctgataccccaatgtccttctttgactttgtggttgatcctcattctttcccccgtacagtggaaaacatctttcatgtttccttcattatacgggatggttttgcaagaataagacttgaccaagaccgactgccagtaataggtaaatgatactatgtttggaaaaattagttttagagaaaatatatttgttagtagaatttaagtattttactaaatgtaaatgaattttcaatgtagattaacttttacaatattgtatcttgctcaactacctgaagatactgaaaacatggccagcgtctaaaattttgatggattcatctatatcattgattcaacatctgctgtaaatattaacaaagaaatgatataatttccctcagatcttaatttagaaagttggtgattgcagtcatttttgtagtatccctctttctaatcacgttttgtcagatgccggcaccttcttttctctttgaggttctatgaatctttcattcttacctgaataatttcacactctccattactcatgtcctcctaaggtctcctgtggagagtgaatatttccatcgcacttacttgctactttcaatgttctcaatgtcctattggactcactagggcttagctctgtggttgacacatagatatgcagattttcaaatgtctggaatgtgttactctactacatgttttttgaaatggaaacagatggaatgactggctactgtaataatactacagcagctccataatgcatgaaatcctaaaaagtatgtaatattataagtatcttttcaatacaggtttcattgcgaataatcatccagtttccgttaggaatccctgttccgatttaataaccctttggtaaatttgaaaaatttgtctttccaacagagcctgttaggtattaatggaagaaatgaggggtttggacattacacacaagtttggaatccagggattatagctttgaggtttcgtgcctgggaggttaactctgcctggtgccctgccaagtcttgctctgcttcattgcagatta

SEQ ID NO: 139 - DNA, 2270 bp, Homo sapiens
  CDS (159)..(1337)
tgcggagcctgcatctctgaagctgcctcggtgaagagccacagcattattttttttctctttgggagagtagctgtctgggatttgagatcctatcttccctgcaaattaccaggttgcatcttcactgataggaatacatttcttcaccaaaggacatggatgaaaatgaaagcaaccagtctctgatgacaagcagccaatatcctaaagaagcagtaagaaaacgtcaaaattcagcacggaattccggagcaagtgattcttctaggttttctaggaaaagcttcaaactggattatagactagaagaagatgtaactaaatccaagaaaggaaaagatgggagatttgtgaatccgtggccaacatggaaaaacccctctattccaaatgttctcagatggctgataatggagaaagatcacagcagtgttccaagttctaaagaggaactagacaaagaactcccagtgcttaagccatattttatcactaaccctgaagaagctggagtgagggaagctggcttaagagtcacatggctgggacatgccacggtaatggtggaaatggatgagctcatatttctcacggatcccatctttagctctcgtgcttcaccatcgcagtacatgggtccaaagcgatttcgtcgttccccgtgcacaataagtgaactccctccaatagatgcggtccttatcagtcacaaccactatgaccatctggactacaattctgtcattgctttgaatgagcgatttggtaatgagttgagatggtttgtgcctttgggtctccttgactggatgcaaaaatgtggctgtgagaatgtgattgagttggactggtgggaggagaattgtgtccccggacatgataaggtcacttttgtctttacaccttcccagcactggtgtaaaaggactctaatggatgacaacaaggtgctatggggcagctggtctgtcttggggccttggaatcgattttttttcgcaggagatactggttattgccctgcttttgaagagataggaaaaagatttggaccttttgaccttgcagctattcccatcggagcttatgaaccgaggtggtttatgaaataccagcatgtagacccagaagaagctgtaaggattcacactgatgtccaaacaaagaaatctatggcaattcactggggaacttttgccttagcaaatgagcattacttagagcctccagtgaagctgaatgaagctctagagagatacggacttaacgctgaagatttttttgtcttgaagcatggagaatcaagatacctaaataataatgatgaaaacttttaataaatgtgagcacaggcacttttaatgaaaaaggcatcatctaagtttaaaaacaaatgaaaagacttagaaattcatgaatattgtgattattttacatttggaaacaacttctgcaagtttatgttttatgttttgtgtaataacttgcttcctagtatgatcagctcatgtacactatgagagggttcaggggtgggtcatttaaataatgaattggctaatgtggattttaaatttcatatcatgatataagcactgcaatggaaatgtttttactaaaacattatatttttgtggtactagaatttcctgaggtgaaaaaccgatattgaagattcatttttcttttttccattcttcaggaccttcggcaaggtgagtcaaggctctctacctacctagatgtttttcagaggcctacaaatacaagtatctttcttatatgcacattctaataaatgatgaaattcagtccaacatgcttattataaacatagcaattcttgctctatcaaattagcttatatgccaaatattaaatatggtttatttaggtaagcataaaaacataggggctatcatttttaaagacttgattttctctattgtggtaaaatatataaatacatatttgccattttaaacatttaccattttaaccatttttaagtgtacagttctttcgcattaatgcacccatgaccaccattcacttaaatttttaaaagaacagtatattctttttttcctagagccttcagatgagagggaacagtatattctattgcacgtctacaattcccaaaagacctcttactttgggaggccaaggtgggtgggtcacttgaacccaggagtttgacatcaacctgggcaacatggtgacctcccgtctttctcggaatgtatataaaaataaaaaaaaaa

SEQ ID NO: 140 - DNA, 1844 bp, Homo sapiens
  CDS (333)..(1490)
gagtgtgtgggagtgagagtgtgtgggagtggggtgagggagaagctgacgggacgcgaggcggtgagaaactgggcgagtgtgcgaggacgcccggccagcctgcgggagccgcagtcggcggaggagaaaggaggcggctcccggtatcccgaccccctccccctcctcttcttcccccacttccagccgcccggcggcccgcgcttcctcgaaggccccagcccggctcagtcggccgagagcgagggaggagccccccgacccaggtgagcggtagacgttacatccaagaggaaataatccaggcaaggaagcacaagctgatcaagatgtgtagttctgtggctgccaagttgtggtttttgacagatcgtcgcatcagggaagactatcctcaaaaagagattttacgagcattgaaggccaaatgttgtgaggaggaactggactttagggctgtggtgatggatgaggtggtgctgacaatcgagcaaggaaacctgggtctgcggatcaatggagagctaatcactgcctacccacaagtggtggtagtcagagtaccaaccccttgggtgcaaagtgatagtgacatcactgttttgcgccatctagagaagatgggatgtcggttaatgaaccgacctcaagccatcctgaactgcgttaataagttctggacatttcaagagttggctggccatggtgttcctctgccggatactttctcttatggtggccacgaaaattttgctaaaatgattgatgaggctgaagttctggagttcccaatggtagtaaagaatacgcggggtcacagaggtaaagctgttttcttggctcgagataagcaccatttggctgatctaagccatcttattcgccatgaagcgccatacctgttccagaagtatgttaaagagtctcatggacgggatgtacgtgtcattgtcgtgggaggccgtgtggttggcaccatgttacgttgttcaacagatgggagaatgcaaagcaactgctcattaggtggtgtggggatgatgtgctcattgagtgaacaagggaagcagctagctatccaggtgtctaatatcctggggatggatgtgtgtggcattgacctgctgatgaaagatgacggctccttctgcgtctgtgaggccaatgcaaatgtaggtttcatcgcctttgataaggcttgtaatctagatgtagctggtatcatagcagactatgccgcctcccttctaccctctggccggctcacccggcgtatgtccctgctctccgtggtgtccactgccagtgagactagtgagccggagctgggtcccccagccagcactgctgttgacaacatgagtgcaagttccagctctgttgacagcgaccctgaaagcacggagcgagagctgctcaccaagctcccagggggcctgttcaacatgaaccagctgctagccaatgaaatcaaactactggtggactgactccactggtaattaaccaacaaaacccttgtaaaactttctttcttcttttctatttttaaaaccaacttgcaatgctgttcatggaggatgctcaggaagatgagagaaaattagtaggattagttggagagagtgggagatagatgagacctctgctagtaagatgttactttcatttacaaatcctacaaatagagaggcagaataggtggggtatagaaaaatgtcaggctctcatagttacccttttaaattgctaaaaaatgtgtatgctcataggccatgaggaacaaatactttttttttttcatggtcccttgcttttgtttttgtacaaaaaaaaaaaaa

SEQ ID NO: 141 - DNA, 456 bp, Homo sapiens
  CDS (14)..(136)
ttccggcaccaccatgtcgaaggtttcctttaagatcacgctgacgtcggacccacggctgccgtacaaagtactcagtgttcctgaaagtacacctttcacagcagtcttaaagtttgcagcagaagaaatggaataggaataaatcctgcacagactgctggaaatgtttttctaaaacatggttcagaactgcggattattcctagagatcgtgttggaagttgttaatatctgctacttggaacatacgattgcctttcagaataaatattggtattttttgttgttgtaaaattgaaatcaggcatttaacatactatgaaaacaccaggagtcaatgattaatgaaaggtgactcatctgtccctatttgatgtccatattcttcttataaaagggattcctatataattaagggttctaatgggcccaaaaaaaaaatctttttgggct

SEQ ID NO: 142 - DNA, 1519 bp, Homo sapiens
  CDS (84)..(968)
aaacagttgccttttcctctcacagaaggaagatttcattttgtttgagacgagaaaccaaaccacacaccaaagagaggggtatgatggctaagaagcccccaaaaccagcccctcgcaggatcttccaggaaaggttaaagattactgctctacctttgtactttgaaggttttttattaatcaagcggtcaggataccgggagtatgagcattactggacagagttgagaggaactactcttttcttttataccgacaaaaagagtataatatatgttgacaaattagacatagtagacctcacatgccttactgagcagaattcaactgaaaagaactgtgcgaaattcacccttgttttgccgaaagaggaagtacaactgaagacagagaacacagaaagtggggaagaatggagaggcttcattcttacggtaacagagctgtcagttccccaaaacgtgtcactcctacctgggcaagtaattaaactgcatgaagtcctagagagagaaaaaaaaaggaggattgagacagagcagagtacgtccgtggaaaaagagaaggaaccaactgaagattatgtggatgtactgaaccctatgccagcatgtttttatacagtgtcccggaaagaggcaactgagatgctccagaagaacccttctttgggaaatatgatcctgaggcctggtagtgacagtagaaactactccatcactattcggcaggagatagacattccaagaatcaagcactacaaagtgatgagcgtaggacaaaactacactattgaactggaaaaacctgtaacactcccaaaccttttcagtgtcattgattattttgtgaaggagactcgaggaaatttaagaccatttatatgttcaactgatgaaaacactggtcaagaacccagtatggaagggagaagtgaaaagttgaagaaaaatccacacattgcatgaaatacaatgtgaaagctcctttgtatatcttggtaatttatattttcaaaacgaagttcttacttttaaagagaattacctatattctcctgatactgattaccaagtcattcacctgaacaccagaattagaattaaacattgtaccatacaatttcattatcttatcagaatgaaaccaattcacagggaaactagagactacggctgtggtggtaacctgcagatatacacattcccatgcactgacataagttgaaaacacatagtactttctagatggaatttttttctttaggcctcaatgaaatacatttcccctatataattccaacagcagtttctctagttctaaattttaccaattcccaaaaaacctaagttttgctgaaatctgatttgaccaatttatcaaatatgtcattttaattacctagctggaagttagagacatgaaatgtactagaggagcccttttccaatggaaatattatataccacattttttgttaatggaaataaatgtctccattcccaaaaaaaaaaaa

SEQ ID NO: 143 - DNA, 4958 bp, Homo sapiens
  CDS (1)..(2301)
atggcccgcgggtcgctgggggtcagcccccgggcccccctcgctgcgccccgctttagccagtgtggaatgtggcgtgtctgcgcgttccaaacccgctctcgcctggaatgttgcgtgtgcctgcgttccgagcccgttggttacaccggaagtgatgggcggggacatcgcccacactccccggctgttgccttgatggtccagagcagggtctggcagtggagagtgcccctggtgaccaagaatgtcctacgtttgggcacaggggtcaggggaagaccgtgcacaaggttcggagagattaagtcacctgctgccgccatcaacacgttgcagttcgagtacgcactgtgtttaggccgagttcagcggcctggtcacgacttctgtgtgccggctgagcggggtgtcactgaggatgtcagaggatgctttaggcctgaaggacaggacatgctggcgctgctgctggtgggccgcctgtcctgcccgcagcccggactgtcagcccccgtgactgtcagcccccgtgactgtcctactattccctggtggcggggaacaggtctgcttgatttgttcactgctgtgcccccggcactttcccccgtgcctggctgggctgaggagcaggagcggcttcgcttggagcaggagcgagagcaggaacagaagaaggccaatagcctggccaggctggcacatacccttcctgtggaggaaccccgcatggaggcgccacccctgcctctgtctccaccggctcccccgccggcacccccaccaccacttgccacccctgccccactgactgtcatccctatccctgtggtgaccaactcccctcagcctctacccccacccccacccttgcccgcggcagcccagcctctgcccctggcgcctcgtcagccggccctggttggcgcccccggactcagcattaaggagcctgcccccctgcccagcaggccgcaggtgcccacccctgctcccctactgccggactcgaaggccaccattccacccaatggcagccccaagcctttgcagcccctccccacgcctgtcctgaccatagcgccacaccctggagtccagcctcagctggccccccagcagccgcccccacccacgctggggaccctgaagttggcaccagctgaagaagtcaaatccagtgaacagaagaagaggcccggggggatcggaaccagagaagtccacaacaaattggagaagaacaggagggcccatctgaaagagtgctttgagaccctgaagcggaacatccccaacgtggatgacaagaagacgtccaatctgagcgtgctgcggacggcgctgcggtacatccagtccctgaagaggaaggagaaggaatatgagcatgaaatggagcggctggcacgtgagaagattgccacgcagcagcggctggcagagctcaagcacgagctgagccagtggatggacgtactggagattgaccgcgtgctgcggcagacgggccagcccgaggatgaccaggcctccacctccaccgcctctgagggtgaggacaacatagacgaggatatggaggaggaccgggcgggcctgggcccacctaagctgagccatcgtccccagccggagctgctgaagtccaccctgccaccccccagcaccacccctgcgcctctgcctccacacccacaccctcacccccactccgtggccctacctcctgcccacctccccgtgcagcagcagcagccacagcagaagacccctctgccagcccctcctcccccaccggctgcccctgcccagacactggtgccagctccagcccatctggtggcgacggctgggggtggctccacggtcatcgcccacacagccaccactcacgcttcagtcatccagactgtgaaccacgttctgcaggggccaggcggcaagcacatcgcccacatcgccccctcggcccccagccctgcggtgcaactggcgcctgccacaccccccattgggcacatcactgtgcaccctgccaccctcaaccatgtggcccacctgggctcccagctgcccttgtacccgcagcccgtggcagtgagccacatcgcccacaccctctcgcaccagcaagtcaacggcacggccggcctggggcccccggctactgtcatggcaaagccggccgtgggggctcaggtggtgcaccacccccagctggtgggccagaccgtgctcaaccctgtgaccatggtcaccatgccctccttcccagtcagcacactcaagctggcttgaggacgaggccactcagaggcccccagtggggacagggagggggacctgtcccccactctctcacccaccagctccacacattccagccaggcccaggccagcccccccacccacccccaggcctcctaggggaagggggtgcaaagactctgagccaagggagggaagggccaccctgctgcgctaggacttggtaagatgactctgagaaaatgcgagactctgatggaatgtgccacctgtccggcccagtgccagctccagtgccgctcctgcttcccctccctaccctcggaaatcagtgcgatgtggacgtcacgctccctgacttctcccccgccctgccccgccttcgtgtgctgctgctgctattgctgtctggtgaggtggcccaggcccccggctttcctccggagcctcatgttctcttcccaggcctttggaggggaaatggggaaagcagaactgaagccacttggcccagaaagctgcggattggggtgataaggggccttgctctgagcacaggtgacagatcataggaagtggctggtctggagtcccacccggacaggtggggcctcagcctggggctctctgacccggttgcagtcactgtgattcgttaccgtagatactacttaaaatgattctctaccaacaataaaccaaacccagccactgccaagcttcctgtgccctcaccccaatccctgccactgggctctggacctcaggagggcaggctgaggtggggaaggagggacttggctgtccttccccttccccgtcccctgcagcctgggtctggatgggaggagagccactgggcccctgtccccagtccccagtccccagccctgggcttggctcttggcttccagaaggcagcaaagaggggcgctgtcctgcgttcagcccctgatctctgacctctgctgagtgctgggcactgctccaagggacaggtgggcctggcggcctgtgggtttgggtgcctcctgcagtttgggagacatggaccagcatctggtcttgtttccaggagcatagaagccacatcgttgagacatcaggaaggtaaaaacccagcggcttagccaagccctaagcctgtccccagaccaaccctgggacctatacagaacagagggccagagctagggctgctgcttctgctccagcccctttgcctctgtcctcccatcccctcaacaccctgcttctcccggggacgcttttgagtgggccctgcccggggagctgcagagcagcagcacctttctctgagaagaggtccttggttgggtcaaggacagggctgagcgtggaagggggaggagtcaggggctctgtgttaggatgcggctttctctgcctctgggcagcctgctttggcctttccttgtatgtgggtgtttattacaagtgggccccccccccctccccacctggacacacacacaccagtggccttcagtgtagcgggaggaagccggtgtccctggatgtgaagctcacactgatgggctggggcaggggctgggcggcgagggggcccggggaggggacagagctgaggatttcctggagtgccctgcaggccaagaggaggtcagcaaaggtcttgaatagattttctctggaaataaagaatccttagatcctaaaaatcccttcctgttccctcctggtcctggacacctcccaggggactgttccttatttctctctcctggtgtgggtaaagggacagttacaaaccaggtcaccatcctcagaggctgagcctgtacccaccccagcacagccacctgccagacccgtggctctgggagagagcccttttgctattccattgtgacagcgatgcaggcctgaccggacggggcagttagagcagcctcgtggagctcgcccctcccctcagcctgcccgcctctccctgcatcctgagccagtgcccccgggcctgcacagatacctcatcatccacccgctgcccctccccgtccctgtccccagcatcgggggcctgcaaatctagtgccgaaatctagtgccgaatgactatgtccagattggtgacgatgggtgttgctgtttttcttgtgtttgtgaacgcatgtgatgctgtggaagtgggcagtcaccacccagcccttccttgggcgtctcccccagagtgctgtcgggaccacatctgtcctcacctgtgggagcgcctggccctccctccctagcccttccagcctgggacacacacacacacacacacacacacacacacacacacgcacgcacacgcacacatcttacctctcatgcgtgttttaccttttgatgttcagagtggctcactggctgggagtccttacctcggggaggagggggaggttggttccttggggggccaaagaaggcagggaatgcctggagggtaactggggggccaccatgaccccttctctctccagaaacagctgcttctccccccatcccagggtcccacccccaacccccagaggtggcccttgtttacagtgaggactcggccactgtgtctctgtttcctgaaatataaactgtagcgaccccagactgtagagatttttatgtgtttggatacatctgctgtgtggaaaaaaaaaaaa

SEQ ID NO: 144 - DNA, 974 bp, Homo sapiens
  CDS (234)..(440)
agccaggggcccatttgggggcccagcccccaatcccacccagcagaggaagccaaggtcggggcagctgtgattgctccctggtcctggagaggaaactggccatctgctttatctgaagattttcagctgatgaagaactaggaggctcaaacactatcttacctgagtccaggacaagtgacttggagagtgtgctcttctgtggcaggatcaggtctgtctagggcaggatggcccaggatctcagcgagaaggacctgttgaagatggaggtggagcagctgaagaaagaagtgaaaaacacaagaattccgatttccaaagcgggaaaggaaatcaaggagtacgtggaggcccaagcaggaaacgatccttttctcaaaggcatccctgaggacaagaatcccttcaaggagaaaggtggctgtctgataagctgatggcatggagccctgccctgagtgtctgtccctcttcagccaagcccaagtctcctagacccccagggagccagtgaactgtcaccttctcttcatcacagaatgagtaaagatccctgaacaaatgcattgtgaacccattccccactcccaccttcaactcttttctcccattatttcctccacctgctgggtctctgctgaccttgctgggaacactctgaggacagtgtggctggccgagcggttggccccatgggtggtggggtgtgagaagcctgcaataccccaagaccccagagggcagtccttaggaagcacttacaccacctgggaacccctccgtcttttccctctactctcatcctaggaataaagcatttccacgccagagtagtttgggctgggggccagggttgggtggtcctgtccctccatatcatgtcctaccctatggtcctgttcctagtcatttagatcaccccagatggcctgatgacaacaagagtttgtgaagttaaaaaaaaaaaa

SEQ ID NO: 145 - DNA, 4144 bp, Homo sapiens
  CDS (373)..(1626)
tcaagctcgccccgcgcagcccgagccgggctgggcgctgtcctcgggggcctggggaaccgcgcggtttggagatcggaggcacctggaacccgtggcaagcgccgagccgggagacagcccgaggaaccacgggttctggagctaggagccggaagctgggagtccggaggagagcggagcccggagcccggagcccggggcggcgcgtctgggtctggcgcttcccgactggacggcgcgcccgctggtcttcgccacgcgccctcccctgggctcgcgttcatcggtccccgcctgagacgcgcccactcctgcccggacttccagccccggaggcgccggacagagccgcggactccagcgcccaccatgcgcctcaacagctccgcgccgggaaccccgggcacgccggccgccgaccccttccagcgggcgcaggccggactggaggaggcgctgctggccccgggcttcggcaacgcttcgggcaacgcgtcggagcgcgtcctggcggcacccagcagcgagctggacgtgaacaccgacatctactccaaagtgctggtgaccgccgtgtacctggcgctcttcgtggtgggcacggtgggcaacacggtgacggcgttcacgctggcgcggaagaagtcgctgcagagcctgcagagcacggtgcattaccacctgggcagcctggcgctgtccgacctgctcaccctgctgctggccatgcccgtggagctgtacaacttcatctgggtgcaccacccctgggccttcggcgacgccggctgccgcggctactacttcctgcgcgacgcctgcacctacgccacggccctcaacgtggccagcctgagtgtggagcgctacctggccatctgccaccccttcaaggccaagaccctcatgtcccgaagccgcaccaagaagttcatcagcgccatctggctcgcctcggccctgctgacggtgcctatgctgttcaccatgggcgagcagaaccgcagcgccgacggccagcacgccggcggcctggtgtgcacccccaccatccacactgccaccgtcaaggtcgtcatacaggtcaacaccttcatgtccttcatattccccatggtggtcatctcggtcctgaacaccatcatcgccaacaagctgaccgtcatggtacgccaggcggccgagcagggccaagtgtgcacggtcgggggcgagcacagcacattcagcatggccatcgagcctggcagggtccaggccctgcggcacggcgtgcgcgtcctacgtgcagtggtcatcgcctttgtggtctgctggctgccctaccacgtgcggcgcctcatgttctgctacatctcggatgagcagtggactccgttcctctatgacttctaccactacttctacatggtgaccaacgcactcttctacgtcagctccaccatcaaccccatcctgtacaacctcgtctctgccaacttccgccacatcttcctggccacactggcctgcctctgcccggtgtggcggcgcaggaggaagaggccagccttctcgaggaaggccgacagcgtgtccagcaaccacaccctctccagcaatgccacccgcgagacgctgtactaggctgtgcgccccggaacgtgtccaggaggagcctggccatgggtccttgcccccgacagacagagcagcccccacccgggagccttgatgggggtcaggcagaggccagcctgcactggagtctgaggcctgggacccccccctcccaccccctaacccatgtttctcattagtgtctcccgggcctgtccccaactcctccccacccctcccccatctcctctttgaaagccagaacaagagagcgctcctctcccagataggaaaagggcctctaacaaggagaaattagtgtgcggcaaaaggcagttttctttgttctcagactaatggatggttccagagaaggaaatgaaatgtgctgggtggggccgggcctccggcggcccggctgctgttcccatgtccacatctctgaggcctgcaccccctctgtctagctcggggagtccagccccagtcccgcaggctccgtggctttgggcctcacgtgcagaccctgccatgcagacccatgcccccctcccccaggcagctccaagaaagctccctgactcgccccttcaggcctggcaagctgggggcccatcgccgtggggagtccctcccaccaccctcgccgcaggcagctgcagcccccagaggggaccacaagcccaaaaaggacaaaaatgggctggcctggaatggcccagaccccagcctcccctcctccctcccatcctcacccaggccaaggcccaggggctctgccaggacaccacatgggagggggctcaggcctcagcctcaagatcttcagctgtggcctctcgggctcggcagaagggacgccggatcaggggcctggtctccagcacctgcccgagtggccgtggccaggatggggtgcgcattccgtgtgctttgcttgtagctgtgcaggctgaggtctggagccaggcccagagctggcttcagggtggggccttgagaaggggaatgtgggacaggggcgatggtgcctggtctctgagtaagatgccaggtcccaggaactcaggcttcaggtgagaaggagcggtgtgtccaggcaccgctggccggcagccctgggctgaggcacagactcatttgtcaccttctggcggcggcagccctggccccggcctccaagcagttgaaaaagctggcgcctccttggtctctaggatccaggctccacagagcacatgactagccaggcccctggcttaagaaggtcgcctaagcctaagagaagacagtcccaggagaagctggccgggaccagccaggagctgggagccacaggaagcaaaagtcagccttttcttcaagggatttccctgtctcagagcagcctttgccccagggaaatgggctctgggctggctgcctgcaccggccatgtcgacccaggacccggacacctggtcttgggctgtgttcagccactttgccttctctggactcagtttccccgtctgagaaatgagagtcgaatgctacagtatctgcagtcgcttggatctggctgttgagttgacgggttccttgaaccccacaaaatccctctccaaccacaggacccttcggctcaccaagaacggggcccaggggagtcaggcctattcgctgcacttcctgccaaactttgcccccacaagcctggtcatcagccaggcagccctcccagtgcccaagggccaccaaccccagggaaacagggccagcacagaggggccttcctcccccacagagctcccatgacatagtctgctctgggcggaagagctttgctgccagccagggatgtccagaggtcggtgcagcccctatccctgctcaggagtgggctcagagtctagcaaatgctaaggcccctcaggctgggctctgaacgaggacctggactcagagccagacagggcagcctcagacccttctctggggctcctggaccttgggccataatttctgagcctcggtttccccatctaaggaacagatgtggtcgttccgccctctcagctggatgagactgtcctggaggatccaccccggaacagacagaatggtgtctctcaggatggtgctctgagagagggcagagtggatgccccactgccctagaccctcggtagacgtggggtctctggggcggggtctgtggctgtgactgaagtcggctttcccgttgatgtcttgatgctcctatctgtgcacttaccgtaggtagggacacgtgtccatgcaccacagacacacccacgacacctgatctcgtatcactagcttgcggccaggtcatgatgtggccccggaagctggccctgcgtgccatgagtgcgtcggtcatggagtccggagcccctgagccggcccctggtgacgcacagccctcacagctcaaacgcccacccccactcccaccatctgcaggtggtgaaaacaaaccccgtgtatctctcaataaaggtggccgaagggcctcgatgtggaaaaaaaaaaaaaa

SEQ ID NO: 146 - DNA, 546 bp, Homo sapiens
  CDS (23)..(493)
cgctcggcttcttcgcgccgagatgcctaagaaggctggtgcgacgaccaagggtaaaagccagagcaaggaaccagagagaccacttcctcccttaggtcctgtggcagttgatcctaaaggatgcgtcaccatagccatccatgcaaaacctggctccaaacaaaatgctgtaacagatttgacagcagaggctgtaaatgtagctattgcagcacctccatcagagggagaggctaatgctgagctctgtcggtatctttccaaggtcctagaactcaggaagagtgatgtggttttggataagggtctctcactttgtcacccaggctggagcacagcggcacaacctcgggtcactgcagccttgacttccctggctcaaacaatcctcccacctcagcctcccaagttgctggaactacaggtgcatgccacccacacccggctaattttcgtattttttgaagagacgggatctcgccatgttgcctaggctggaagtcttgggcttcggtgatcctcctgccttggcttcccaaagtg

SEQ ID NO: 147 - DNA, 988 bp, Homo sapiens
  CDS (508)..(660)
agtactgttttaggtattggggatataccaaggaataaaacaagattcctggagggagaggggaacggacagcaaacaatagacacaatacgatcgtgaggtatatagttaatgttggtgatgagtgctcctcaaaggaaacaactaaaaccagacaagggaagtcggggtgtcagggagaatggtttgtagtattgatgacaatggttaaggaaggcctgagttctgcaaagacctcaaggatatgagggactagagtgccctctgctgtggaagagcctgcgcaaagatcctgaggtgggaggggtcagggagccaactcattttacggtaagtggaggtgggatccaggggaggattctgagcagaggagggacgtggcccaatttgggctttgaaaggatcctgcttgtctgtgtgccagcatcctggtggtggttgggggagtctgcatcaatcctgggtgctgttacctgaaaaaatagcaggtgttagacgaaagaacagatgtctggcccattgtctccagtctgttcctgtccacagcttccctttatgctgagcccctgccacatgcatcatcatcctggccatgtggcattgtcacagaccgtctctcctgctagcctcctaactcagggcctgggtcttccccagcattaagtaaatcagtctcaggcagacagccctttataggtgtttgggccaggtgcggtggctcacgcctgtaatcccagctctttgtggggccgaggtctttgagctcaggagttcaagaccagcctgggcagcatgacaaaaccctgtctctaccaaaaatacaaaaattagccacgcatggtggcacacacctgtggtcccagctactcgggaggctgaggtgggaggatcgctggagcctgggaagttgaggctgcagtgagccgtgatcatgccactgcattccagcctgtgtgatggagagagaccctgtctcaaaaaaaaaaaa

SEQ ID NO: 148 - DNA, 1131 bp, Homo sapiens
  CDS (117)..(683)
gtggtggaattcccgggctccaggggttcccacccccggcctgcggtgggcagcagctcaggttctccaaatcattgcgtagttccgaataccctcggccacacctggccttctccatgctcggaataacttcctgcagcgaccaacaggctaaagagggggaaggtctggagggatccagcaccggctcctcctccggcaaccacggtgggagcggcggaggaaatggacataaacccgggtgtgaaaagccagggaatgaagcccgcgggagcggggaatctgggattcagaactctgagacgtctcctgggatgtttaactttgacactttctggaagaattttaaatccaagctgggtttcatcaactgggatgccataaacaagaaccaggtcccgccccccagcacccgagccctcctctacttcagccgactctgggaggatttcaaacagaacactcctttcctcaactggaaagcaattattgagggtgcggacgcgtcatcactgcagaaacgtgcaggcagagccgatcagaactacaattacaaccagcatgcgtatcccactgcctatggtgggaagtactcagtcaagacccctgcaaaggggggagtctcaccttcttcctcggcttcccgggtgcaacctggcctgctgcagtgggtgaagttttggtaggtgagtgtcagagtgagccgacccaggccacatcctggcagtggaggcacagtcacccggggcagggccaggatcttggtatatcctcagatctcagtgggcagcgacatgaagtcaggcaatttcttgcaaccaccaccgaggccccgaaaagcactggtcgtcagggagctcctccccttggcccccagcctgtgccagccctggcccggctgccacacctctgtttcctaggctggggacccagcttgtctctccttgtttcttcccactgcactgtggtgcttcagtggccaccagcctcgtcacatacaccagcatctttctgtacctcctccccttggtgacctgaagtcactgtgacagttctccaggaaggaggagcttcctacttttgagtttctctgtggaaataaaacatgaatcttgtttccctaaaaaaaaa

SEQ ID NO: 149 - DNA, 1412 bp, Homo sapiens
  CDS (1)..(1158)
atgactcgccagtgccaggcctcaaaccaacagctcgggccccagcccctggccacaacgccacctgacctgttcctgggttttcagcagctgtttgggacctttgctagctggggccgggagccccactgcgggggccccgatttcccccaacccatccagaccgttgaagatgcccttaggaagccttcaggacttcagctgattaattacattcacacttatcttccacttcctgcaaagtaccaaatacacagaacctttcgacctgcacctccaggaggtgtggcaggcgtgcttgtgggacacccgtttgacacggtcaaggtacggcttcaggtccagagcgtggagaagcctcagtaccgcgggacgttgcactgcttcaagtccatcatcaagcaagagagcgtgctgggcctgtacaagggcctgggctcgccgctcatggggctcaccttcatcaacgcgctggtgttcggggtgcagggcaacaccctccgggccctgggccacgactcgcccctcaaccagttcctggcaggtgcggcggcgggcgccatccagtgcgtcatctgctgccccatggagctggccaagacgcggctgcagctgcaggacgcgggcccagcgcgcacctacaagggctcgctggactgcctcgcgcagatctacgggcacgagggtctgcgtggcgtcaaccggggcatggtgtccacgttgctgcgtgagacgcccagcttcggcgtctacttcctcacctatgacgctctcacgcgggcgctgggctgcgagccgggcgaccgcctgctggtgcccaagctgctgttggcgggcggtacgtcaggcatcgtgtcctggctctctacctatcctgtggacgtggtcaagtcgcggctgcaggcggacggactgcggggcgccccgcgctaccgcggcatcctggactgcgtgcaccagagctaccgcgccgagggctggcgcgtcttcacacgggggctggcgtccacgctgctgcgcgccttccccgtcaacgctgccaccttcgccaccgtcacggtggtgctcacctacgcgcgcggcgaggaggccgggcccgagggcgaggctgtgcccgccgcccctgcggggcctgccctggcgcagccctccagcctgtgacgctcaccccgccctccttccccagggctccttctcagaaacctgggacataaattggcccctgagtcgattgccctgcttcctgctgggatgctgcgagctgtggagtctatcagacgtgggctgaattttgctgatcagctgggtagttttggccgagaactgcacttgcctcagtgttctcatctatgaaataaggaccctcatgcccacactgtagagtcacgaagctcagagattattcccagcag

SEQ ID NO: 150 - DNA, 1937 bp, Homo sapiens
  CDS (201)..(1934)
aggcgagatcttccaccctcctgctccagggcctctaggtggcctccagagtgggctccacagcttgaaggcggcgtttttccgcgggtggtcgcagcgtccgcagagtcggagaaagctgcgtcagagactgcaacagtcagcacacattcctgtctgatcaggctccctccctcaagtcctctgcgatagctctggcgatgcttcaggactggtgcaggaggatgggtgtgaacgcagagcgctctctgctcatcctggatatccctgacgactgcgaggaacatgagttccaggaggccgtgcgggctgccctgtcgcccctgggcaggtaccgagtgctcatcaaggtcttcagaaaggagctcggggccagggcagccttggtggaattcgctgagggtttaaaccaaagcttgattccccgccaaatagcaggcaaagggggaccctggaaagtgatctccctgccccaggcccttgatgctgagtttcaggatatacccagtttccctgcacagccccaggggcaagcagtggccagaggtgcaggtgaagcaggagctgcaggtgaggcaggatctgtaggtgaggcaggaggtgtgaatgaggaaagatctgcaggtgaagatgaggcaggaggtataggtgaggcaggaggtgtaggtgaggcaggagcagcaggtgaggcaggagcagcaggtgaggcaggagcagcaggtgaggcaggaggtgcaggtgaggcaggaggtgcaggtgaggcaggaggtgcaggtgaggaaggaggtacaggtgaggaaggaggtgcaggtgaggcaggaggcgcaggtgaggaaggaggtgaagatgaggcaggagctgcaggtgaggcagtaggtgcaggtgtggtggaggcctggacccagtcatggcgccagaccctgcggcctctggtgaaaactatggcctaccgggaactgagacccttttccgggagggagcagccaggctgcgtggaagagtcctttgagagctggttggaggacgccaaggatatgctgcagctgtggtgccacgcgtcggaaagggagagaaggaggcggctgctggacagcttggatggcctggccctggatatcgtgagcggcctcctggaggaagatccagacttctctgcgcaggactgcctgacggcgctggggcaggtgtttaggagccgggatacatggatgacctcgcggatgaagttcctgacctgcacgcaggggccccaggaggggctgtttgccttcgtggtgcgcctggaaggcctgctgcagaaggccgtggagaagggggcggtccacccagccatggccaaccacctgcgactgcggcaggtgctgtctcgggcccgccccagcgaggcactccaggataccctgaggaggatgcagctggagaggaggccacctgacttcctgaggctgctgcggctcatccgggacatggaggcgtgggcagcctccctagcaaggagccagcagggtgtggcctgggcagcggccccagtggagagtgaagacccagctgctgcccaggcctccccggcccagggggacgccagcgaggctgatcccggagcagaagatgctgatgaggctgcttccaccaccaaagaggccgccagggttgcccctgccactggggaagatgaaaatgcccctgcaggccttgaaggcctaggtcagggaaggtcccccgacgcccctgggggcctcccagccaggatgggcagtgcagtcgacatggccccaggaggtcccagctgggagccagagggccttgtccaggttggaggccaggaggctgaggagcctccccaggaggggctcaagcccatcttagaggagtcagaaaacgaggatgaggatggggctggggaggcgggcaagcccaagtcccccccgggcaaatag

SEQ ID NO: 151 - DNA, 2545 bp, Homo sapiens
  CDS (365)..(1642)
aggacgagaacattctgggttggacgattctcggaatactgcccttcttgcttggaaaatgatcagagatggttgtgtaatgaaaattacaaggtcgttgaacaaggttagtagtgtcttgcctttttattctgtcatctcaaacttcataaacagtcatacgttctttgaaacgtagatttaatgtgtgcagtcatttataaatcaatgacatttctcttttttgtcataaaactgtatactgaagaaattaacgaatgcacagtttctaaagctgttgcatttgtctgtggaatcataggttcccactaagaagaatttcagcattctggccagaaatttgaatacaattcaagttgaagaaatgtctgcctgtaacattagcatccagggtcccagcatatataataaggagcctaaaaatataataaatcctcatgaaaaagttcaaatgaagtcaatttgtgcaaattctcctataaaggcacaacaggatcaattacaagtaaaaaacaatataaaagcaagtcttcacaatgtcaaaagttccttacctctttttaatactaagtcctctacttctgtggggcagttgcagtctcctaccttgaattcacctatctatatgcaaaagcaaggaaaaaatgaacatcttgcatttaataccaaatctaaggcttcaacagttggttcagaattggtacttgtttctaccaccgttccaactgttcatcatgtttctgatttggaaatgagctctactctggactgtttacctgtgttggctgattgggaggatgtggttttactgccagcatctcagcctgaggaaaacgtagactgtacagttcccattagtgactcagacttagagatttcatttaattctggagaaagattaatggttttgaaagaattggaaatgtcaagtcatgaaaactttggagacatagaggaaactcctcaaaaatctgagacttctaagtctattgtgtacaagagtcctcacactactatttataatgtaaaagaagccaaagatccaggttcagatatttctgcctttaagttacctgaacacaaatcaagtaccttcaacagagttaatgccaatatgtctcatcctttagttttggggaaacatcctcttctttcaggtggtaccaaaaggaatccatgcagtccccaagctttcccaccagcaaaaaaacaacccttcactattcatgaagaaaagcctacatcatctgattgctccccagtaagaagttcttcctggaggcgtctcccatctatattaacttctacagttaacctacaagagccatggaagagtgggaaaatgacacctccattatgcaagtgtggtcggagatctaagagacttgttgtttctaataatggacctaaccatggaaaagtcttctattgttgccctatcgggaaataccaagaaaacagaaaatgttgtggttatttcaaatgggaacaaacacttcaaaaggaaagagccaacagcatggttccatctcattccacagggggactcacttttagttctccagaaacaagccatatttgtgacagaaatttaagtatttccaccaaaaattctttgagactcaggccttcaatgaggaattgataacctttcatgtatgaatcctaattgttccttgaatttccaaacatgagtattctgataacatcttacactattttatttttattttatatattaatgtttactgcatttaccatactttcttcaggaaccacaagtgtaatcttttgtaaacagtatttattagattacatataataagcaacaatagtatatgatccttcttttatagttagaccttgaaacaagtctaaactatttttaaattatttgcaaaaaatgtgactaataaaaatccctagtctattttcaggtagattcttgtactttgagattatcataatcttctaactggaattttatatttttctaaaaacttttataagttctttagttttatttcaggcttgaacattggttctgatttgtatatcaacatatcagaagaattagtcaactaaagtttgaaaacctatgtagcagagatctggttcagaaactgcttctatactatacatttaaaaattaatcagcaattgatggtattatttttatattaagaaatgataggaacattgacactaatgtggaggaatttgccaaatattttatttcaaaatttagcctctgatatcataaccacaagatattttaaatcaacagtttctaagcatactaccacagtttttatgacctctccatcatcttgtgtttctagagattgacagatacctatgttggtttatagatatggtaattaatgaaacaacttttaattgtcttccattctttctttcttaggtcatttcttttgtcttcccactgatagtctttgcagctcttgaataattctacctttctggggaatttggaaggggctgagtttttacatgctcctgaatctcctttatagtggtctgg

SEQ ID NO: 152 - DNA, 1245 bp, Homo sapiens
  CDS (295)..(1242)
gcgggcggcagaggcgatcagaagtttccaagggtcacttgtgtctcgtccgtgggaagaccgggggagcccagaaggccttggtgtggaattctgagagctgattcctgccttgtcttctccactgttcctggaggaatccgagaagagcagagcggagggagccccagacacggtccgcgggagagctgtggggcttggtgagtgtttcgtggcctctcgggttggtcagcacccccagccagctggcccaggacccctctacagaagtccaggagagcaggcgtcaccaagatgtccaaccccttcctgaagcaagtcttcaacaaggacaagacattccgccccaagcgcaagtttgagccaggcacccagcgcttcgagctgcacaagaaggcgcaggcgtcgctgaacgccgggctggacctgcggctggccgtgcagttgcccccgggcgaggacctgaacgactgggtggctgttcacgtggtggacttctttaaccgcgtcaacctcatctacggcaccatcagcgacggctgcacggagcagtcctgccccgtcatgtcggggggccccaagtatgagtaccgctggcaggatgagcataagttccggaagcccacggcactctccgcgcccaggtacatggacctgctgatggactggatcgaggcgcagatcaacaacgaggacctcttccccaccaacgttggcactccgtttcccaagaacttcctgcagacggtgcggaagatcctgtcgcggctgttccgcgtgttcgtgcacgtctacatccaccactttgaccgcatcgcgcagatgggctccgaggcccacgtgaacacctgctacaagcacttctactatttcgtcaaggagttcggcctcatcgacaccaaggagctggagccactggtgcgcgggcttggggctgagggcgtgcggttacgctggcggccccggctggagttgggccccggggaccctgctgatgggacaagtggtgaggtagctgggagggatcctgcgttctcccacggaacaaatgccggcgacagatctgaaaatgctgactctctggcctcatggggtagcctgctgcccctggtctcagaaagaaatgaccgcccggatgtgccactgagagccccgcgggtctcccggtgcccgaaccgccgctggggcctcggagacttggaggaggacgctctggaaccatcatcccgcttctctccggcctga

SEQ ID NO: 153 - DNA, 1574 bp, Homo sapiens
  CDS (101)..(901)
atgctgcccctgctcgccgcgctcctggccgccgcctgcccgctgccgcccgtccgcggcggggccgcggacgcgcccggcctcctcggggtgccctccaatgcttcagtcaacgcgtcctccgcggacgagcccatcgccccgcggctgctggcctcggcggcccccgggccccccgagcgcccgggcccggaggaggcggcggcggcggcggcgcctgtgcaacatcagcgtgcagcggcagatgctgagctcgctgctcgtgcgctggggccgcccgcggggcttccagtgcgacctactgctcttctccaccaacgcgcacggccgcgctttcttcgccgccgccttccaccgcgtcgggccgccgctgctcatcgagcacctggggctggcggcgggcggcgcgcagcaggacctgcgcctctgcgtgggctgcggctgggtgcgcggtcgccgcaccggccgcctccggcccgccgccgcccccagcgccgccgccgccaccgccggggcgcccaccgcgctgccagcctaccccgcggccgagccgcccgggccgctgtggctgcagggcgagccgctgcatttctgctgcctagacttcagcctggaggagctgcagggcgagccgggctggcggctgaaccgtaagcccattgagtccacgctggtggcctgcttcatgaccctggtcatcgtggtgtggagcgtggccgccctcatctggccggtgcccatcatcgccggcttcctgcccaacggcatggaacagcgccggaccaccgccagcaccaccgcagccacccccgccgcagtgcccgcagggaccaccgcagccgccgccgccgccgccgctgccgccgccgccgcggccgtcacttcgggggtggcgaccaagtgacccgctccgctcctccctgtgtccgtcctgtgtccgcgcgcgcgggtgcctttcccgccggggactcggccggtgtgcttcgtgctgtagttatcgttagttcctcttcccgagatggggccgccgagagaccccagcgcctttgaaaagcaaggtttgtgctgcgcttccagttccgaaaagcagatgtttaagcccttggactgagggtgggatcgcagctccgaagacggagaggagggaaatggggccctttcccctctattgcatccccctgcccgactccttccccgcacccacgtgccctagattcatggcagaaaatgaccaaatcctgtgtatttgttttatatatttaataactgttttaaatgaaagttttagtaaaaaaaatacaaaacaaaaagattaaattgctattgctgtagtaagagaagctctttgtatctgaacatagttgtatttgaaatttgtggttttttaatttatttaaaattggggggagggcatgggaaggatttaacaccgatatattgttaccgctgaaaatgaactttatgaaccttttccaagttgatctatccagtgacgtggcctggtgggcgtttcttcttgtacttatgtggttttttggcttttaatacagacattttcctccaaaaaaaaaaaa

SEQ ID NO: 154 - DNA, 1974 bp, Homo sapiens
  CDS (315)..(806)
atgagtaagccagaatggttgatagtgggggaggatgatgacgacgctgcctttgcccctgtcttgtgtgaaacaactgcctgtgggtttcctgcagcgcagtggggagtgagaggagaaacgtcctgccgtgccacacccacgccctcccctgcgaacgcgcacgtgaacgggagcgcggacgcgcccgagaatgcgcttcacctcgcagaagcggcacctcggctgctgcccggcagcggcagcagctgcgtcggcggcccacacagcagcgagaggcgagaggaggctgcctcgaggaggctgcctcgaggatgaagtgcaaacccaaccagacgcggacctacgaccccgaggggttcaagaagcgggcggcgtgcctgtgcttccggagcgaacgcgaggacgaggtcctgttagtgagtagcagccggtacccggaccgctggatcgtgccgggcgggggcatggagcccgaggaggagccgggcggtgcggcggtccgagaggtgtacgaagaagcgggagtcaaggggaagttaggccggctcctgggcgtcttcgaacagaaccaggaccccaagcacagaacgtacgtgtatgtactgactgtcacggagctgctggaggattgggaagattcggttagcattgggaggaagcgagagtggttcaaagtcgaagatgccatcaaggttctccagtgccacaagcccgtgcacgccgaatatctggagaaactaaagctgggcggttccccaaccaatggaaactccatggccccatcctcgccagatagcgatccctaatgaacagcaaagatgttcagtattgtgctgaaagaaacattgatgtgaacccagtgatcagtggaattgtcaagtacaggtgagcacttctgtgttcccaagaagacagctcatctggtttcttcctgcatcttgggacactccttccctgtctataccactgactcttgctctggttgttgtactcttatacgtgaatagactcttaattcagcacctatagccttttgttgtgcttttttgatgtgtctgccttcattagactatgatgtctttgagagcaaagactatttttccttactctttgcatattctgcatctgagacactacttgaaatatggttggcatcactgaaggttctttgattcaattaatattttgtaatcaccgtgtggcaaaacattccccttccaatctggtgctagtagagtatatgctatctaggcaccatgtgtgtggcttttgtgtatcaggtgtttcagaaatatttcaagacagttgtaagatgtttgaggacaagaattattactcctatttctatgtcataccacacagtagctgcacagttttaagattatgccatcacctagggtaatgttttgtagaatcagtccttcgtgtaacaactctagtgtttttgtactgttgatgatttgcttaaattttattcaaaaactatcacttgctataaaggtaattgtaaaaataaatacagtggacgcaaaataatgttgtgagtttttataaaaataaattttaaaatgatatataagacatttttttgcaatgcctgccctaaccacttcttacatgtcatcttaacatctctttgaggaaacactgtttcctcattttacagatttaacatactgtattatttgatgccagagccaacaggctatatcataggcagtttccaaacttaattatgccatttagtttgtctagatttcttttgcctctctcactgatccatttggctgtagttttcatcccttttccagtacacacagctagctcctcatcctacctggtttctgcatatgagaatgcagagggctgagagagggcaaaattgttgtcatttagaaaaggcatttaggaaagaggctgctattagaggggaacacaaagtgaaggtttttttaaaaaagaggacttgca

SEQ ID NO: 155 - DNA, 2808 bp, Homo sapiens
  CDS (344)..(2689)
ccgagatcccgggcacgctggctctggtgagcgcggcctccgcggctccttggccccaggatgccctctctcgtggggaaaggagggtcgggaaaggccgagcgtaggtccaccttctccaatccctgcctgctgggagaggacgatctcttgagaaaggaaagacttctgtgctcccgagaacttcctatcaggtcctggctgcagggaaacaagctgggctttttataattaaggttggaagaagtcaccacaggcagcagaactccatcttgagatgaaataacatctacctggacctctggcagaatttcaaggcacacactgggctgactctggcgccatgatgttgccttatccttcagcactgggagatcaatactgggaagagattttgcttccaaagaatggggaaaatgtagagactatgaagaaattgacccaaaatcataaagcgaaaggcttgccttctaatgatactgactgcccccagaaaaaggagggaaaggcccaaatagtggtaccagttacattcagggatgtgactgtgatcttcacagaagcagaatggaagagactgagtccagagcagaggaatctatacaaagaagtgatgctggagaattacaggaatcttctctcattggaaaactttcattcttcagcagaaccaaagccagaaatctacacttgttcctcctgccttctggccttctcctgtcagcagttcctcagtcaacatgtacttcagatcttcctgggcttatgtgcagaaaatcacttccatccagggaattctagcccagggcattggaaacagcaggggcagcagtattcccatgtaagctgttggtttgaaaatgcagaaggtcaggagagaggaggtggctccaaaccctggtctgcaaggacagaggagagagaaacctcaagggcattccccagcccactccaaagacagtcagcaagtcctagaaaaggcaacatggtggtagaaacagagcccagctcagcccaaagaccaaaccctgtgcagctagacaaaggcttgaaggaattagaaaccttgagatttggagcaatcaactgtagagagtatgaaccggaccataacctggaatcaaactttattacaaacccgaggaccctcttagggaagaagccctacatttgcagtgattgtgggcgaagctttaaagatagatcaaccctcatcagacaccatcgtatacactcgatggagaagccttatgtgtgcagtgagtgcgggcgaggttttagccagaagtccaacctcagcagacaccagagaacacattcagaagagaagccttatttgtgcagggagtgtgggcaaagctttagaagtaagtccatcctcaatagacatcagtggactcactcagaggagaagccctatgtttgcagcgagtgtgggcgaggctttagcgagaagtcatccttcatcagacaccagaggacacactccggtgagaaaccctatgtgtgcctggagtgtggacgaagcttttgtgataagtcaaccctcagaaaacaccagaggatacactcaggggagaagccttatgtttgcagggagtgtgggcgaggctttagccagaactcagatctcatcaaacaccagaggacacacttggatgagaagccttatgtttgcagggagtgtgggcgaggcttttgtgacaagtcaaccctcatcatacacgagcggacgcactctggagagaagccttatgtgtgtggtgagtgtggccgaggctttagtcggaaatcactcctccttgtccaccagaggacacactcaggggagaagcattatgtctgcagggagtgtaggcgaggttttagccagaagtcaaatctcatcagacaccagaggacgcactcaaatgagaagccttatatttgcagggaatgtgggcgaggcttttgtgacaagtcaaccctcattgtacatgagaggacacactcaggagagaagccttacgtgtgcagatgtatgggcaaagcttttgtgatcacacaccacagggagaatctgcatgtggggacactgtggagctctgcccagatgaccttttcaggggtaacaccccagctgcttgagagaacagtgttgctgctggcagagatgcattccagagatgcactccgctctggaactcactctcagccacagggagctgcatgcaccacaggggcaatgcacctttgcaggggtaccttctggccccaacccttgactcaacggggacaactccagaaggtcattccagatccagagatccccatcgaactgaaggatcactgggttgcagacacattgcaggtcccacccataaatctcatcataatggcaattgaatttcaacatgaattttggaggagacattcacaccatagcatcaattacgcagtggctcctcagtcaggtctgatgagggaaaaggatgtgcatgtctgggagtgtgggcccccaccctttgccagaactgcccctataacaccaacttctgatcagaattggaggccactgagggaaaagaagggtcactatcaggacctttccactccatcccagaaggaaacagaattgaaacgtactagagtttctctcagaagaaagagagatgcaaattctccactccaggactatggctttggtgcctaagaaggaagagttcagtttttgtgtagagcttatttccaacatgagatgggtgttcaaatgcctgcagcatccaaacaagtcctgttaatgaggggaccagattgggtggggtgggg

SEQ ID NO: 156 - DNA, 2764 bp, Homo sapiens
  CDS (248)..(2302)
tttttttatgaggctgggaaaatagaacgaggaagtggtgacgcactgggctctcacgaatacaactagaagctgcaacgactgtgtggctctatcgattcgggagaggtccagaccggaaatggtcgtttccatggtaaccctgagcaggttgcctgggagatgacctctttcgggtctctttgaatctccgctgtagcgtcacctggaaggcagatctaacagagaacctggactgtctcctatcatgattcccgggaaatatcgctctgtttctggccgggctgcgaacaacgtgaactgcgggcttcatctggttattcaaacatcatcgcttcctgaaaaaaacaaagttgaattcaagctaaataaagacacatcgtcattccccggtagacttttacaacatgaccttgaaagaaactactcaagtaggcaaggggatcatattaatttggtgagctcatcattgtcatcatttcctattcttcaacgttcttctgaagagaaaattctttactcagacaggttgagcctagaaagacaaaagctgaccgtatgtcctatcatcaatggggaagaccaccttcgtttgttgaactttcaacacaattttataactcggatacaaaatatttctaatctacagaagttaatatcgttggatttatatgataaccagattgaagaaattagtgggctttcgactctgagatgtcttcgtgtccttctgttggggaaaaacagaatcaagaaaatctcaaatctggagaatctaaaaagcttagatgtcttggatcttcatggaaatcagattaccaaaattgaaaatattaatcatttgtgtgagttgagagttttaaatcttgccaggaactttttaagtcatgttgataatcttaatgggctggattcactaactgaacttaacttgcgacacaatcaaatcactttcgtgagagatgtggataatttgccctgcctccaacatctctttctcagctttaacaatatatctagttttgacagtgtttcctgccttgctgactcttcttccctctcggacaccacctttgatggcaatcccatagctcaagagtcatggtacaaacacactgtccttcagaatatgatgcagctgcgccagctagatatgaagagaatcacggaagaagaaaggcgtatggcatctgttttagccaaaaaagaggaagagaagaagcgggaaagtcataaacaatctttgcttaaggagaagaaaaggttaacaattaacaacgtagctcgacagtgggacttgcaacaacgagtagccaatattgctacaaatgaagatagaaaagattctgactctcctcaggacccctgtcagattgatggaagcaccctctctgcattcccagaggaaacagggcctctagactcaggactcaacaatgctttacaaggtttatctgtcatagacacataccttgttgaagtggacggggatacactttccctatatggctcaggagcactggaatctctggataggaattggagtgttcaaacagcaggaatgatcacaacagtctccttcactttcatagaatttgatgaaatcgtccaagtgcttcctaaactgaagattaagtttcctaattctctgcaccttaaattcaaggaaacaaatcttgtaatgctgcagcaatttaacgcactagcccaactccgtcgtattgaccagttgacaattgatcctcaaggaaatccagttgtcaattttacactctggaaatactatgtactgtttaggctaagccatttcagtatgcagaaaataaatggaacagaggtgacacagaatgatatgataatggctgaaaggctctttggaatcctagcacatgtagcatcttctgagttaccccagtatcgtctgatttccattctgggtgatgccaggaaaaagcaatttcggtatctactagaatccaaaggaaaaaaacctggtattatcaacgaagaaaataatgacagcaaaagacttgtaggagaaaacacaaatcgtgctacattaaattatactacaagagacttttataatgaaaagctagaggaaataaaggaaaagaagaaattctgtaaaacatatatagaagaccttgtgaaggaagccacagaaatcaacatgaaaaatgaggctttgcagaagctttggccacagatgttcattgagctcgttagggatgcagtcatagaaattcgcaataaaaattcctatatgaagctctgcctacagcagataacagaccaaaaataaaaatggcctttagttacagttgattttggcagttttattttttgaaggttgaaaatatgcaggttatacatgttaaaacaacaacaacactatcctataaactagaaagactagtataaaagcattattgcccactgttctcatagctaaaagttaagaaggaaagaaggaaagcaggagaaaggaaggattaattgcctgtatgtgaggaccaaacaacctttgggaactaaacagttttcagagatggcgtggcactgcatccttggttcttgctttgattggtgccctgctatagcccaaagcacgtagtatttgctgatgattcagcatgagctgcatctacctacttttagctgataattttcagttatttccctttttattttatgtcatgatttcaaagccaaaaatatgttctttttatgagtgaagaataaacttactaacaaattagtc

SEQ ID NO: 157 - DNA, 1116 bp, Homo sapiens
  CDS (55)..(465)
ctgcccgggccgtggcaggaagccggaagcagccgcggccccagttcgggagacatggcgggcgttaaagctctcgtggcattatccttcagtggggctattggactgacttttcttatgctgggatgtgccttagaggattatggcctgggtccaactgacagcgtttactggcccttattcgtcctgattttccacgccatctcccccatcccccatttcattgccaaaagagtcacctatgactcagatgcaaccagtagtgcctgtcgggaactggcatatttcttcactactggaattgttgtttctgcctttggatttcctgttattcttgctcgtgtggctgtgatcaaatggggagcctgcggccttgtgttggcaggcaatgcagtcattttccttacaattcaagggtttttccttatatttggaagaggagatgattttagctgggagcagtggtagcactttattctgattacagtgcattgaatttcttagaactcatactatctgtatacatgtgcacatgcggcattttactatgaaatttaatatgctgggttttttaatacctttatatatcatgttcactttaagaaagacttcataagtaggagatgagttttattctcagcaaatagacctgtcaaatttagattatgttactcaaattatgttacttgtttggctgttcatgtagtcacggtgctctcagaaaatatattaacgcagtcttgtaggcagctgccaccttatgcagtgcatcgaaaccttttgcttggggatgtgcttggagaggcagataacgctgaagcaggcctctcatgacccaggaaggccggggtggatccctctttgtgttgtagtccatgctattaaaagtgtggcccacagaccaagagcctcaacatttcctagagccttattagaaatgcagaatctgaagccccactctggacccaggacattttgatgagatccaaaggagttgtatgcacatgaaagtttgagaagcatcatcatagagaagtaaacatcacacccaacttccttatctttccagtggctaaaccacttaacctctctgggtgttacctgctcatttgttta

SEQ ID NO: 158 - DNA, 2545 bp, Homo sapiens
  CDS (350)..(949)
gttattatccccatatttaaaatggaggaaggccagagaggtaaagtggcttatcctaggacacccagctagtgaaggccaccagagccaggatgcctgattctaagtcaagagaatttctaccaccccacactggcagccgaaggaggcaggcagggcagcaaacaggcagtttccttccttctctccctggaaagatgacagccgtgacgccagtcctcctgagcccgccagccccaccatcggcctcgataagaagactcgccgaaagttcctggacctgggggtcaccctgcgccgagcatccacgggcaagagccggaaggagaaaggcagcaaccgactgtccatgggcagcagggagtcagtggaggggtccggcaggtcagggggctccccgttcctgcctttttcctggttcacggacagcggcaagggctcagcatcctcgggtagcaccacctcccccacctgctcccctaaacacgagggcttcagccctaagaagtcagcttcccaggaatccactctgagtgatgactccacgccccccagcagcagccccaagatccccagtgggccctggcaggaggccaaatgttcttacccctaccacacgctgtctcagtcttcagatgagttcctggatgaacccctcccccctgtccaccactggaccagccagcaggtgggccagtggctgcagagcctcaacctggaacagtatgctgctgagtttgctgcacggcaggtagacgggccgcagctgctgcagctggacggaagcaaactaaagagcctggggctcagcaactctcatgaccgggcactggtgaagcgcaagttgaaggagatggcagcagctgccgagaaggagcgcaaggcccaggagaaggctgcgcggcagcgggagaagctccggcgccgagagcaggaggccaagaagagctaggggagggtgcacaggcgctggcacccggcaggggcagccactggctccgcgggcacaggcctcaccagggaggctggacctgggcgctgcacttgggctagcctggtcccacgctctcaggggggacatgctctctcttaccctgtcacttggtctagacccagagaccccagaaagggagaccccagggagagggcctagtaataaatcctattttgaggacttgtttggcacagagttcctgggggaggagcagatgaaggggagagggcagagaggccagggctgaggcaagtctgggagcctgggtcaggctgtcccattgccctcaggccatcatggggctggggtggaggggagctaggaggcctgcctgcctgcttgcctgccagaggccctgaggccgggccccagggctcagagctgggctgggcatttcagcaggagcccatgtgggagcggctcctctccactcttccagggggctgtgtggtgggagagctctgtcctgctcccccaagaggccagtgggcgctgcagcaagtcgcactcagggtagactcccagccaaactcctcaacaggagcgcagagaaagcagcctggggcgagtgcagtctttgccaggactcaagaggggaggatgaacatccccttctccctctcccctcctctgtcctgtgggtcccagggggcgagatgacaccacacaggtctgcctctcagggcccattcaagacctggtctttgacccattctccaagccaggactcccttcacttcctgctgcttcctcagagggcacctaagtcctctttgggagctgagcaaacaggaactgatagggacagaggacaccacttccaccagccaaggcctaggagctgctgacctggtcagccctcaccccagccaggcagagaggcaaaacctgggggtccccggcagctacgagattggaaaggttcatcagccctcccccatctgccccaggcattgtcagggaatcagtgggctcagaactggcaggcggtgcaagctctgcttccctgggccacactgagggctggggccagctccctggatgggggtggagtttaccagcagcctggggacagcatgtgtcctttttaggaaatgtccttggaggaagtgttcatgtgtggcgctggtcagcagctagtcccgcttccaggacactggtcagagttaccgatgaggcctgggggctcccgcttggaaacccctccagctcctcccatctgcccagacagagcggcagatggcaccaatgcatgctggctccctcattcctgcccaggggctgtggcttacggccagcaccctgtacctgggactcagcccttatcccccctctgctatctgtgctgggagaggggcttcggagggaaacagatatgaggacactggcaccatctgggcctggtggcagggccatgggaggttggaaggcacccacatccttaaagccatcagtagctctagtgggtgcccacctgcatgtgaaggggaggcagttctcaatttatttcaataaatccttatgatgtgccagtgaccaaaaaaaaaaaaa

SEQ ID NO: 159 - DNA, 1555 bp, Homo sapiens
  CDS (936)..(1055)
agcggcacgagcacagctgttggtttctgagcagcatggagtcacactggttcctcctggcctgaggggaaagagagacagagagagatcaacctggatgccttccttcacaataatctcatggaggtaatttaaagaatcctttttttggagagtcagagagaaaagcaaaaaaaaagagcatgaggaatttgaagactgagagatgagttgtgtagcaccaacattttctttctgcctgaccttcatacctgatgaattaaaagcataggatgtttggaagagtgagataagggacacattgaaaacagagaggcaatctgaaggctaccttgacgcatctgcaaagctcccagattctgactttcacaagacttgctttctgtttctgggcctcgcctaaacagactgccagtcatccgaaccgtggcaggatggagatgtttgtgtaaggtagactcaagtttgcaagactcaagaaggaaaccaccaaactaattttactttcacttaaaccagattgaaaccaagacttgaagaattaaaaactttgacattaaccattgattcactccaatgaaataattgtgttatagccagaatcatggtgaaattggaacaaggcttttgatgggatttttaattgagggacttatattaaattggatattttctttaatgaacagcatgtggccaaaattctattttcattaaagtatattaagcatcatgacaactcatattaaacctgcaacaaatgattaatgacatttagagacttcaaatgtcatgagacaccttaaatattaagaatcaaaaagaacacctcaaagttgtttctattcttagtaattatgcttaaaaaaacatctttccttgctttgaaagccagttgctaaaaataaaaactgttccatgaaaaatcacaatgcccaatgataaatttatgtatttgttttttaaagggggaggatggtgagaaaaatagaaagctcctggctgacatcagaggtcacaagatgagttcctcatttgtccaaatgacattcagctgctaaaagaagtcagacttttagagggctgttgaaaagacagtaagtcaggaggttttcagtacatgactgcaggggaatcagacacaggctagtcacttaagttgcttaattgtccgtgtacccttagcccacgacttcagggctcagcagcttcatccttcatggcaccaaaccttgacgtaagggattcaaagacacactcataagaatcgtgaatttgtcctcatgcaaaatttgggggactggctacaaaaccgaaacaaggagatcgtatccctaagtgaaagggactttatattaattgtcagttataacaatatgtaaaatacataaaagagatagagcactgcaggccatcaaggtcaaacatttgaaacagaattaaactaaattataaggaggattaaatggcttttgtctttgtaaagaaaagaatatgcatgcattgattgcctatgtagaaggattaataaatcttttggcatggtaaaaaaaaaaaa

SEQ ID NO: 160 - DNA, 2612 bp, Homo sapiens
  CDS (64)..(2559)
acctttgaggaagctgataagaatggtgacggcttgctgaatattgaagagatacatcagctgatgcataaactgaatgttaatctgccccgaagaaaagtcagacaaatgtttcaggaagccgacacagatgagaatcagggaactttgacatttgaagagttctgtgttttttacaaaatgatgtctttgagacgagacctttatttgttacttttgagctacagtgacaagaaagatcacctaactgtggaagaactggctcagtttttgaaggtggagcaaaagatgaataatgtgacaacggactattgtcttgacatcataaagaagtttgaagtttcagaagaaaataaggtgaaaaatgttcttggcatagaaggcttcacgaacttcatgcgtagtcctgcctgtgacatatttaacccattgcaccatgaagtgtaccaagacatggatcagcccctctgcaactactacattgcttcctctcacaatacatacctgactggagaccagctcctttctcagtccaaagtggatatgtatgcacgggtgctgcaagagggctgtcgctgtgtggaagttgactgttgggatggcccagatggagagccagtagtacatcatggttacactctcacttcaaaaattctcttcagagatgttgtggagaccatcaacaagcatgcctttgtgaagaatgagtttcctgttatattgtctatcgagaatcactgcagtatccagcagcaaaggaagattgctcagtacctgaaaggaatattcggagacaaactggacctgtcatctgttgatacaggggagtgcaagcagcttccaagccctcaaagtttgaaaggcaaaattctagtgaagggtaagaagttgccttatcaccttggggatgatgcagaggaaggggaagtttccgatgaggacagtgcagatgaaattgaagacgagtgcaaattcaagctccattatagtaatgggaccactgagcatcaggtggaatctttcataaggaaaaaactggagtcactgttaaaagaatctcaaattcgagataaagaagatcctgatagtttcacagtgcgggcactactgaaggccacgcatgaaggcttaaatgcacacctgaagcagagtccagatgtaaaggaaagtggaaagaaatcacatggacgatccctcatgaccaactttggaaaacataagaaaactacaaaatcacggtctaaatcttacagtactgatgatgaggaagacacacagcagagtactggcaaggagggtggccagctgtacagattgggtcgccgaaggaaaaccatgaagctctgccgagaactctctgatttggttgtgtacacaaactccgtggccgctcaggacattgtggatgacggaaccacaggaaatgtgttatcattcagtgaaacaagagcacatcaggttgttcagcaaaaatcagagcagttcatgatttataatcaaaagcaactcacgaggatttacccctctgcctaccgcattgattccagtaacttcaaccctctcccctactggaacgcaggctgccagctagtggcactgaattatcaatctgaaggacgaatgatgcagttaaaccgagccaaattcaaggcaaatggcaattgtggctatgtcctcaaaccccagcaaatgtgcaaaggtactttcaaccctttctctggtgaccctcttcctgccaaccccaaaaagcagctcatcctgaaagttatcagtggacagcaactccccaaacctccagactccatgtttggagatcgaggcgagatcattgacccttttgttgaagttgaaattattggattgccagtagattgttgtaaagatcaaacccgtgtggtagatgacaatggatttaaccctgtgtgggaagaaacactgacatttacagtacacatgccagaaatagctttggttcggttccttgtgtgggatcacgatcccattggacgagactttgttggacaaagaactgtgaccttcagcagcttagtgcctggctaccggcatgtctatttggaaggactgacagaagcatccatatttgtacacataaccatcaatgaaatctatggaaagtggagccctttaatactcaaccccagttatactatattgcactttctaggagctacaaagaacagacaactccagggtctgaagggactgttcaataagaatcctaggcacagttcttcagaaaacaattcccattatgtacggaagcgatccattggagatagaattctgcgacgcacagctagcgccccagccaaaggcaggaaaaagagcaaaatgggcttccaagaaatggtggagataaaggattctgtgtccgaggccacaagagatcaagatggcgtgctgaggaggaccacacgcagtttgcaagcacgccctgtctctatgcctgttgacagaaaccttctgggagctttgtcgctgcctgtatctgaaacagcaaaagacattgaaggaaaagaaaactctctagtacaaatctgaataggaaacaacttaagcagaagataaagatggcagaagaaaagggaaag

SEQ ID NO: 161 - DNA, 2193 bp, Homo sapiens
  CDS (1)..(2190)
atgcctgaacctccccccgccccaggctcctgcgcagcccgagcctccaagacgagcgccgctcctggctccacggcgcccagtcccatccaccgttcaagggctgaggagcgtgggaccacggcgcggaactggcaggcagctccaactgcagccccggtgcgggatccactgggtgaagccagctgggctcctgagtctgctaatctagtgggaatctggagaacttttgtgtctagctcagggattgtaaatgcaccaatcagcaccctgtcaaaacggaccaatcagctctctgtaaaacagaccaatcggctctctgtaaaatggaccaatcagcaggatgtggcccgtggctcggcgacttacagggagggagaacatggctgctggcttttagcacctggtgggtttcgcgccttgcaactcgacaactgccgggacggagtctggctgcccgaccccctgcggcaggtgctgggcgaggcgcctcccctgcaactagcctgccgcttcccttccggcacccccgccgccagccccgagcgcggacctggagcggagaagagagtgtgcggaaaggatgtatcagaagtaacccactgcacacatgatctcttacatgctacattagaagactcctgggatgttagcagccagttagacaggcaacaggaaaactggaagagacatctgggatcagaggcatccacccagaagaaaataattacaccacaagaaaattttgagcaaaataaatttggtgaaaattctagattgaacaccaatttggttacacaactgaacattcctgcaagaataaggcctagtgaatgtgagacccttggaagcaatttgggacataatgcagacttacttaatgagaataatattcttgcaaaaaagaaaccctataagtgtgataaatgtagaaaagcctttattcatagatcatcgcttactaaacatgagaaaacacataaaggagagggagctttccctaatggaacagatcaaggaatttatcctggaaagaaacaccatgaatgtaccgactgtgggaaaacctttctctggaagacacagcttactgagcatcagagaattcacactggggagaaaccctttgaatgcaatgtatgtggaaaggccttcaggcatagctcatctcttggtcagcatgagaatgctcataccggagagaaaccctatcagtgtagtctctgtgggaaagccttccagcgcagctcctcccttgttcaacaccagcgaattcacactggagagaaaccctatcgatgtaatctatgtgggaggtcctttaggcatggcacatccctcactcaacacgaggtcacacacagtggagagaagcccttccagtgtaaggaatgtgggaaagcctttagtcgatgttcttcccttgtccaacatgagaggactcatactggagagaaaccttttgaatgtagcatatgtgggagggcttttggtcagagcccatccctttataaacatatgaggattcataagagaggcaaaccttaccaaagcagtaactacagcatagatttcaagcacagcacatctctcactcaagatgaaagcactcttaccgaagtgaaatcctaccattgtaatgactgtggggaagactttagtcacattacagactttactgaccatcagaggatccatactgcagagaacccctatgattgtgagcaggcttttagtcagcaagctatttctcatcctggagagaaaccctatcaatgtaatgtatgtgggaaagctttcaaaaggagtacaagtttcatagagcatcacagaattcatactggagagaaaccctatgaatgtaatgagtgtggagaagcctttagtcgacgctcatcgcttactcaacatgagagaacccacactggagagaaaccctatgaatgtattgactgtgggaaagcctttagtcaaagttcatctctcattcagcatgagagaactcatactggagagaagccctatgaatgtaatgaatgtgggagagccttccgaaaaaaaaccaacctgcatgatcatcagagaattcatactggagaaaaaccctattcttgtaaggaatgtgggaaaaacttcagccgaagttcagctcttactaaacaccagagaattcatactcgaaataaactctag

SEQ ID NO: 162 - DNA, 494 bp, Homo sapiens
  CDS (50)..(448)
cggagatcccggggtcgcgcgagagccgcaagcggagttggtgggcgctatgctatcacccgaggcagagcgagtgctgcggtaccttgtagaagtggaggagctcgccgaggaggtgctggcggacaagcggcagattgtggacctggacactaaaaggaatcagaatcgagagggcctgagggccctgcagaaggatctcagcctctctgaagatgtgatggtttgcttcgggaacatgtttatcaagatgcctcaccctgagacaaaggaaatgattgaaaaagatcaagatcatctggataaagaaatagaaaaactgcggaagcaacttaaagtgaaggtcaaccgcctttttgaggcccaaggcaaaccggagctgaagggttttaacttgaaccccctcaaccaggatgagcttaaagctctcaaggtcatcttgaaaggatgagactcaagaaccaagatgggggaccagcaaccccccagggtca

SEQ ID NO: 163 - DNA, 2554 bp, Homo sapiens
  CDS (218)..(1129)
aaaataaaaaatccaaagttgccataaatcatagtatgagttctccatatatgttcacagagagaaagagattccctcacacctcttctacagtggatggaaaggtgcaaaaatctatcaccagcaacagaaggtgcagactgtgttggtggcggtaattttgtccatcaaatgaatatgtgtgaaaacattccctcctttggccctacaggtcagaatggcggcagcggagcatcgtcattcttcaggattgccctactggccctacctcacagctgaaactttaaaaaacaggatgggccaccagccacctcctccaactcaacaacattctataactgataactccctgagcctcaagacacctcccgagtgtctgctcactccccttccaccctcagctctaccctcagctccaccctcagcggatgataatctcaagacacgtgccgagtgtctgctccatccccttccaccctcagcggatgataatctcaagacactttccgagcgtcagctcactccccttccaccctcagctccaccctcagcagatgataatatcaagacacctgccgagcgtctgcgggggccgcttccaccctcagcagatgataatctcaagacaccttccgagcgtcagctcactccccttccaccctcagctccaccctcagcagatgataatatcaagacacctgccgagcgtctgcgggggccgcttccaccctcagcggatgataatctcaagacaccttccgagcgtcagctcactccccttccaccctcagctccaccctcagcagatgataatatcaagacacctgccgagcgtctgcgggggccgcttccaccctcagcggatgataatctcaagacaccttccgagcgtcagctcactccccttccaccctcagctccaccctcagcagatgataatatcaagacacctgccgagcgtctgcgggggccgcttccaccctcagcggatgataatctcaagacaccttccgagcgtcagctcactccctttccaccctcagctccaccctcagcagatgataatatcaagacacctgccgagcgtctgcggggagcgtctgcgggggccgcttccaccctcagcggatgataatctcaagacaccttccgagcgtcagctcactccccttccaccctcagctccaccctcagcagatgataatatcaagacacctgccgagcgtctgcgggggccgcttccaccctcagcggatgataatctcaagacaccttccgagcgtcagctcactccccttccaccctcagctccaccctcagcagatgataatatcaagacacctgccgagcgtctgcgggggccgcttccaccctcagcggatgataatctcaagacaccttccgagcgtcagctcactccccttccaccctcagctccaccctcagcagatgataatatcaagacacctgccgagcgtctgcgggggccgcttccaccctcagcagatgataatctcaagacaccttccgagcgtcagctcactccccttccaccctcagctccaccctcagcagatgataatatcaagacacctgccgagcgtctgcgggggccgcttccaccctcagcggatgataatctcaagacaccttccgagcgtcagctcactccctttccaccctcagctccaccctcagcagatgataatatcaagacacctgccgagcgtctgcggggagcgtctgcgggggccgcttccaccctcagcggatgataatctcaagacaccttccgagcgtcagctcactccccttccaccctcagctccaccctcagcagatgataatatcaagacacctgccgagcgtctgcgggggccgcttccaccctcagcggatgataatctcaagacaccttccgagcgtcagctcactccccttccaccctcagctccaccctcagcagatgataatatcaagacacctgccgagcgtctgcggggggccgcttccaccctcagccgatgataatctcaagacacctcccttagctactcaggaggctgaggcagaaaaaccacgcaaacccaagaggcagagggcggctgagatggaaccacctcccgaacccaagaggcagagggtcggtgacgtggaaccgtcacgcaaacccaagaggcggaggaccgctgacgtggaaccatcatcacccgaacccaagaggcggagggtcggtgatgtggaaccgtcacgcaaacccaagaggcggagggccgctgacgtggaaccatcatcacccgaacccaagaggcggagggtcggtgacgtggaaccgtcacgcaaacccaagaggcggagggccgctgacgtggaaccatcattacccgaacccaagaggcggaggttgagctgagaagaggccagtgcactcaagcctgagcaataagaataaaaccgagtagaacaaaataaaaaattcaaaaaacaaaacaaaacccacactccaaaaactaacaaagaataaataaataatataaaaataaaaaaaaaaaaa

SEQ ID NO: 164 - DNA, 2542 bp, Homo sapiens
  CDS (218)..(1117)
aaaataaaaaatccaaagttgccataaatcatagtatgagttctccatatatgttcacagagagaaagagattccctcacacctcttctacagtggatggaaaggtgcaaaaatctatcaccagcaacagaaggtgcagactgtgttggtggcggtaattttgtccatcaaatgaatatgtgtgaaaacattccctcctttggccctacaggtcagaatggcggcagcggagcatcgtcattcttcaggattgccctactggccctacctcacagctgaaactttaaaaaacaggatgggccaccagccacctcctccaactcaacaacattctataactgataactccctgagcctcaagacacctcccgagtgtctgctcactccccttccaccctcagctccaccctcagcggatgataatctcaagacacgtgccgagtgtctgctccatccccttccaccctcagcggatgataatctcaagacactttccgagcgtcagctcactccccttccaccctcagctccaccctcagcagatgataatatcaagacacctgccgagcgtctgcgggggccgcttccaccctcagcagatgataatctcaagacaccttccgagcgtcagctcactccccttccaccctcagctccaccctcagcagatgataatatcaagacacctgccgagcgtctgcgggggccgcttccaccctcagcggatgataatctcaagacaccttccgagcgtcagctcactccccttccaccctcagctccaccctcagcagatgataatatcaagacacctgccgagcgtctgcgggggccgcttccaccctcagcggatgataatctcaagacaccttccgagcgtcagctcactccccttccaccctcagctccaccctcagcagatgataatatcaagacacctgccgagcgtctgcgggggccgcttccaccctcagcggatgataatctcaagacaccttccgagcgtcagctcactccctttccaccctcagctccaccctcagcagatgataatatcaagacacctgccgagcgtctgcggggagcgtctgcgggggccgcttccaccctcagcggatgataatctcaagacaccttccgagcgtcagctcactccccttccaccctcagctccaccctcagcagatgataatatcaagacacctgccgagcgtctgcgggggccgcttccaccctcagcggatgataatctcaagacaccttccgagcgtcagctcactccccttccaccctcagctccaccctcagcagatgataatatcaagacacctgccgagcgtctgcgggggccgcttccaccctcagcggatgataatctcaagacaccttccgagcgtcagctcactccccttccaccctcagctccaccctcagcagatgataatatcaagacacctgccgagcgtctgcgggggccgcttccaccctcagcagatgataatctcaagacaccttccgagcgtcagctcactccccttccaccctcagctccaccctcagcagatgataatatcaagacacctgccgagcgtctgcgggggccgcttccaccctcagcggatgataatctcaagacaccttccgagcgtcagctcactccctttccaccctcagctccaccctcagcagatgataatatcaagacacctgccgagcgtctgcggggagcgtctgcgggggccgcttccaccctcagcggatgataatctcaagacaccttccgagcgtcagctcactccccttccaccctcagctccaccctcagcagatgataatatcaagacacctgccgagcgtctgcgggggccgcttccaccctcagcggatgataatctcaagacaccttccgagcgtcagctcactccccttccaccctcagctccaccctcagcagatgataatatcaagacacctgccgagcgtctgcggggggccgcttccaccctcagccgatgataatctcaagacacctcccttagctactcaggaggctgaggcagaaaaaccacgcaaacccaagaggcagagggcggctgagatggaaccacctcccgaacccaagaggcagagggtcggtgacgtggaaccgtcacgcaaacccaagaggcggaggaccgctgacgtggaaccatcatcacccgaacccaagaggcggagggtcggtgatgtggaaccgtcacgcaaacccaagaggcggagggccgctgacgtggaaccatcatcacccgaacccaagaggcggagggtcggtgacgtggaaccgtcacgcaaacccaagaggcggagggccgctgacgtggaaccatcattacccgaacccaagaggcggaggttgagctgagaagaggccagtgcactcaagcctgagcaataagaataaaaccgagtagaacaaaataaaaaattcaaaaaacaaaacaaaacccacactccaaaaactaacaaagaataaataaataatataaaaataaaaaaaaaaaaa

SEQ ID NO: 165 - DNA, 2532 bp, Homo sapiens
  CDS (218)..(1753)
aaaataaaaaatccaaagttgccataaatcatagtatgagttctccatatatgttcacagagagaaagagattccctcacacctcttctacagtggatggaaaggtgcaaaaatctatcaccagcaacagaaggtgcagactgtgttggtggcggtaattttgtccatcaaatgaatatgtgtgaaaacattccctcctttggccctacaggtcagaatggcggcagcggagcatcgtcattcttcaggattgccctactggccctacctcacagctgaaactttaaaaaacaggatgggccaccagccacctcctccaactcaacaacattctataactgataactccctgagcctcaagacacctcccgagtgtctgctcactccccttccaccctcagctctaccctcagctccaccctcagcggatgataatctcaagacacgtgccgagtgtctgctccatccccttccaccctcagcggatgataatctcaagacactttccgagcgtcagctcactccccttccaccctcagctccaccctcagcagatgataatatcaagacacctgccttccaccctcagcagatgataatctcaagacaccttccgagcgtcagctcactccccttccaccctcagctccaccctcagcagatgataatatcaagacacctgccgagcgtctgcgggggccgcttccaccctcagcggatgataatctcaagacaccttccgagcgtcagctcactccccttccaccctcagctccaccctcagcagatgataatatcaagacacctgccgagcgtctgcgggggccgcttccaccctcagcggatgataatctcaagacaccttccgagcgtcagctcactccccttccaccctcagctccaccctcagcagatgataatatcaagacacctgccgagcgtctgcgggggccgcttccaccctcagcggatgataatctcaagacaccttccgagcgtcagctcactccctttccaccctcagctccaccctcagcagatgataatatcaagacacctgccgagcgtctgcggggagcgtctgcgggggccgcttccaccctcagcggatgataatctcaagacaccttccgagcgtcagctcactccccttccaccctcagctccaccctcagcagatgataatatcaagacacctgccgagcgtctgcgggggccgcttccaccctcagcggatgataatctcaagacaccttccgagcgtcagctcactccccttccaccctcagctccaccctcagcagatgataatatcaagacacctgccgagcgtctgcgggggccgcttccaccctcagcggatgataatctcaagacaccttccgagcgtcagctcactccccttccaccctcagctccaccctcagcagatgataatatcaagacacctgccgagcgtctgcgggggccgcttccaccctcagcagatgataatctcaagacaccttccgagcgtcagctcactccccttccaccctcagctccaccctcagcagatgataatatcaagacacctgccgagcgtctgcgggggccgcttccaccctcagcggatgataatctcaagacaccttccgagcgtcagctcactccctttccaccctcagctccaccctcagcagatgataatatcaagacacctgccgagcgtctgcggggagcgtctgcgggggccgcttccaccctcagcggatgataatctcaagacaccttccgagcgtcagctcactccccttccaccctcagctccaccctcagcagatgataatatcaagacacctgccgagcgtctgcgggggccgcttccaccctcagcggatgataatctcaagacaccttccgagcgtcagctcactccccttccaccctcagctccaccctcagcagatgataatatcaagacacctgccgagcgtctgcggggggccgcttccaccctcagccgatgataatctcaagacacctcccttagctactcaggaggctgaggcagaaaaaccacgcaaacccaagaggcagagggcggctgagatggaaccacctcccgaacccaagaggcagagggtcggtgacgtggaaccgtcacgcaaacccaagaggcggaggaccgctgacgtggaaccatcatcacccgaacccaagaggcggagggtcggtgatgtggaaccgtcacgcaaacccaagaggcggagggccgctgacgtggaaccatcatcacccgaacccaagaggcggagggtcggtgacgtggaaccgtcacgcaaacccaagaggcggagggccgctgacgtggaaccatcattacccgaacccaagaggcggaggttgagctgagaagaggccagtgcactcaagcctgagcaataagaataaaaccgagtagaacaaaataaaaaattcaaaaaacaaaacaaaacccacactccaaaaactaacaaagaataaataaataatataaaaataaaaaaaaaa

SEQ ID NO: 166 - DNA, 2541 bp, Homo sapiens
  CDS (218)..(1759)
aaaataaaaaatccaaagttgccataaatcatagtatgagttctccatatatgttcacagagagaaagagattccctcacacctcttctacagtggatggaaaggtgcaaaaatctatcaccagcaacagaaggtgcagactgtgttggtggcggtaattttgtccatcaaatgaatatgtgtgaaaacattccctcctttggccctacaggtcagaatggcggcagcggagcatcgtcattcttcaggattgccctactggccctacctcacagctgaaactttaaaaaacaggatgggccaccagccacctcctccaactcaacaacattctataactgataactccctgagcctcaagacacctcccgagtgtctgctcactccccttccaccctcagctctaccctcagctccaccctcagcggatgataatctcaagacacgtgccgagtgtctgctccatccccttccaccctcagcggatgataatctcaagacactttccgagcgtcagctcactccccttccaccctcagctccaccctcagcagatgataatatcaagacacctgccgagcgtctgcgggggccgcttccaccctcagcagatgataatctcaagacaccttccgagcgtcagctcactccccttccaccctcagctccaccctcagcagatgataatatcaagacacctgccgagcgtctgcgggggccgcttccaccctcagcggatgataatctcaagacaccttccgagcgtcagctcactccccttccaccctcagctccaccctcagcagatgataatatcaagacacctgccgagcgtctgcgggggccgcttccaccctcagcggatgataatctcaagacaccttccgagcgtcagctcactccccttccaccctcagctccaccctcagcagatgataatatcaagacacctgccgagcgtctgcgggggccgcttccaccctcagcggatgataatctcaagacaccttccgagcgtcagctcactccctttccaccctcagctccaccctcagcagatgataatatcaagacacctgccgagcgtctgcgggggccgcttccaccctcagcggatgataatctcaagacaccttccgagcgtcagctcactccccttccaccctcagctccaccctcagcagatgataatatcaagacacctgccgagcgtctgcgggggccgcttccaccctcagcggatgataatctcaagacaccttccgagcgtcagctcactccccttccaccctcagctccaccctcagcagatgataatatcaagacacctgccgagcgtctgcgggggccgcttccaccctcagcggatgataatctcaagacaccttccgagcgtcagctcactccccttccaccctcagctccaccctcagcagatgataatatcaagacacctgccgagcgtctgcgggggccgcttccaccctcagcagatgataatctcaagacaccttccgagcgtcagctcactccccttccaccctcagctccaccctcagcagatgataatatcaagacacctgccgagcgtctgcgggggccgcttccaccctcagcggatgataatctcaagacaccttccgagcgtcagctcactccctttccaccctcagctccaccctcagcagatgataatatcaagacacctgccgagcgtctgcggggagcgtctgcgggggccgcttccaccctcagcggatgataatctcaagacaccttccgagcgtcagctcactccccttccaccctcagctccaccctcagcagatgataatatcaagacacctgccgagcgtctgcgggggccgcttccaccctcagcggatgataatctcaagacaccttccgagcgtcagctcactccccttccaccctcagctccaccctcagcagatgataatatcaagacacctgccgagcgtctgcggggggccgcttccaccctcagccgatgataatctcaagacacctcccttagctactcaggaggctgaggcagaaaaaccacgcaaacccaagaggcagagggcggctgagatggaaccacctcccgaacccaagaggcagagggtcggtgacgtggaaccgtcacgcaaacccaagaggcggaggaccgctgacgtggaaccatcatcacccgaacccaagaggcggagggtcggtgatgtggaaccgtcacgcaaacccaagaggcggagggccgctgacgtggaaccatcatcacccgaacccaagaggcggagggtcggtgacgtggaaccgtcacgcaaacccaagaggcggagggccgctgacgtggaaccatcattacccgaacccaagaggcggaggttgagctgagaagaggccagtgcactcaagcctgagcaataagaataaaaccgagtagaacaaaataaaaaattcaaaaaacaaaacaaaacccacactccaaaaactaacaaagaataaataaataatataaaaataaaaaaaaaaaaa

SEQ ID NO: 167 - DNA, 1156 bp, Homo sapiens
  CDS (134)..(769)
agctaactaccgcgccggggccgggtccggggccggggcccgacgtccccgcggggcccgggaccgcgaggaggacggcgggggcctggagcccgcggccgtggcccgcgacctattgaggggcacatctaacatgtcatttgaggagctgttggaattgcagagccaagtggggactaagacgtacaaacaattggtagctggaaatagtcctaagaaacaagcttctagaccacctatccaaaatgcatgtgttgcagataagcacaggcctctggaaatgtcagccaagatccgagtaccatttttacgtcaggttgttcccattagtaaaaaggtagcccgggaccctcgctttgatgatctgtcaggggaatataatcctgaggtgtttgacaaaacataccaattcttgaatgacatccgagcgaaagagaaagagcttgtgaaaaaacagttgaagaagcacctttcaggagaggagcatgagaaactgcagcaactgcttcagcgaatggagcagcaagaaatggcacagcaggaacgaaagcaacagcaggagctgcacctggccctgaagcaagaacgtcgggctcaggcccagcagggccatcggccatacttcctgaaaaaatctgagcagcgccagttggcactagctgagaagttcaaggagctgaaacgcagcaagaaattggagaacttcttgagtcgaaagaggcgacgaaatgcaggcaaggacaggagacatctccctttgagcaaagagtaataaggaactatcctctgctctgccactgccccagggagacatggatctgtgaggacagatttggccacggctggtttccgttcaagggcaaggatcacagctgcccttgaatctcattgcctcagagaagactagagggctcttggactatccctagggctacacaagaatagttcagccttctgccatgccacacagcctcagcttgaatctggttcattgcgtcctcgtgttcttctctcatccttgccttaaaccagggattctgataccgaagaagaggggccaatgaaaaccatggagtctgttcgtgactcccagggctgggacattatgtaggagccacttcataaacattctctttactcatcaaaaaaaaaaaaa

SEQ ID NO: 168 - DNA, 2306 bp, Homo sapiens
  CDS (223)..(1944)
tcattaataagacaaactactggtgaaaaaaagaaccctttccgatattttagtaaacaagaattaagagagctctttacaatcgaggatcttcagaactctgtaacccagctgcagcttcagtctttgcatgctgctcagaggaaatctgatataaaactagatgaacatattgcctacctgcagtctttggggatagctggaatctcagaccatgatttgatgtacacatgtgatctgtctgttaaagaagagcttgatgtggtagaagaatctcactatattcaacaaagggttcagaaagctcaattcctcgttgaattcgagtctcaaaataaagagttcctgatggaacaacaaagaactagaaatgagggggcctggctaagagaacctgtatttccttcttcaacaaagaagaaatgccctaaattgaataaaccacagcctcagccttcacctcttctaagtactcatcatactcaggaagaagatatcagttccaaaatggcaagtgtagtcattgatgatctgcccaaagagggtgagaaacaagatctctccagtataaaggtgaatgttaccaccttgcaagatggtaaaggtacaggtagtgctgactctatagctactttaccaaaggggtttggaagtgtagaagaactttgtactaactcttcattgggaatggaaaaaagctttgcaactaaaaatgaagctgtacaaaaagagacattacaagaggggcctaagcaagaggcactgcaagaggatcctctggaaagttttaattatgtacttagcaaatcaaccaaagctgatattgggccaaatttagatcaactaaaggatgatgagattttacgtcattgcaatccttggcccattatttccataacaaatgaaagtcaaaatgcagaatcaaatgtatccattattgaaatagctgatgacctttcagcatcccatagtgcactgcaggatgctcaagcaagtgaggccaagttggaagaggaaccttcagcatcttcaccacagtatgcatgtgatttcaatcttttcttggaagactcagcagacaacagacaaaatttttccagtcagtctttagagcatgttgagaaagaaaatagcttgtgtggctctgcacctaattccagagcagggtttgtgcatagcaaaacatgtctcagttgggagttttctgagaaagacgatgaaccagaagaagtagtagttaaagcaaaaatcagaagtaaagctagaaggattgtttcagatggcgaagatgaagatgattcttttaaagatacctcaagcataaatccattcaacacatctctctttcaattctcatctgtgaaacaatttgatgcttcaactcccaaaaatgacatcagtccaccaggaaggttcttttcatctcaaatacccagtagtgtaaataagtctatgaactctagaagatctctggcttctaggaggtctcttattaatatggttttagaccacgtggaggacatggaggaaagacttgacgacagcagtgaagcaaagggtcctgaagattatccagaagaaggggtggaggaaagcagtggcgaagcctccaagtatacagaagaggatccttccggagaaacactgtcttcagaaaacaagtccagctggttaatgacgtctaagcctagtgctctagctcaagagacctctcttggtgcccctgagcctttgtctggtgaacagttggttggttctccccaggataaggcggcagaggctacaaatgactatgagactcttgtaaagcgtggaaaagaactaaaagagtgtggaaaaatccaggaggccctaaactgcttagttaaagcgcttgacataaaaagtgcagatcctgaagttatgctcttgactttaagtttgtataagcaacttaataacaattgagaatgtaacctgtttattgtattttaaagtgaaactgaatatgagggaatttttgttcccataattggattctttgggaacatgaagcattcaggcttaaggcaagaaagatctcaaaaagcaacttctgccctgcaacgccccccactccatagtctggtattctgagcactagcttaatatttcttcacttgaatattcttatattttaggcatattctataaatttaactgtgttgtttcttggaaagttttgtaaaattattctggtcattcttaattttactctgaaagtgatcatctttgtatataacagttcagataagaaaattaaagttacttttctcaaaaaaaaaaaa

SEQ ID NO: 169 - DNA, 1537 bp, Homo sapiens
  CDS (64)..(1248)
tcatccaaatccttctctctgaaggcactacagaaccacgtcggggaagctcttcccccagagatggtcaccaggctgtatgatggcatgcggagggtcgacctgacagggaaggcgaagggacccagtgagaacgtgtcccaggagcagttcacagcatccatgtcccacctgttgaaaggaaactccgaggagaagagtctcatgattatgaaaatgatttctgccacagaaggtcccgtgaaggccagagaagtccaaaagtttacagaggatctggttggctctgtggtgcacgtgctaagccacagacaggagctgagaggctggactgggaaggaagccccagggcccaacccccgggtgcaggtgctggctgctcagctgctctctgagatgaagctgcaagatggcaagagacttctggggccccagtggctggactatgactgtgaccgagctgtgatcgaggactgggtgttcagggtcccccatgtggccatattcctgagtgtggtcatttgcaagggctttctcgtcctgtgctcgtctcttgatctgactaccctggtccctgagcgtcaagtggaccagggcaggggttttgagagcatcctggatgtcctctctgtcatgtacatcaacgcccagctgcctcgggagcagcggcaccgctggcgcctgctcttttcgtctgagctccatggacacagcttctcccagctctgtggccacatcactcaccgggggccctgtgtggctgtcctcgaggaccatgacaagcatgtgttcggagggtttgcctcttgctcttgggaggtgaagcctcagtttcaaggggacaacagatgcttcctgttctccatctgccccagcatggctgtgtacacacacacgggctacaacgaccactacatgtacttgaaccatggacagcagacgatcccgaacggactgggtatgggggggcagcacaattactttgggctttgggtggatgttgattttgggaaaggacacagcagagccaagcccacgtgcaccacgtacaacagcccgcagctgtcggctcaggagaacttccagtttgataagatggaggtgtgggcggttggagacccctcagaggagcagttggccaagggcaacaagagcatcctggatgcggaccctgaggcccaggccctgctggagatcagtgggcattcgcgccacagcgaagggctccgggaagtcccggacgatgaatgaggagccgcctgagccttcctggagccaggacctggattcctctgggtagagggcaccgcctgcagcccctcttccctcccacatggtttaactgtaatagcgtaccgcacgggtcacagcctggtagtcccacatgtgccaagaagacgccctctgaagccatgtcctgactcatgggtggatctcccagaaatagatgttttttaagttttcttttttgccctacagggtcaccctcaggatctctccaagaaatcttgtgtcaaattagtaaaaaaaaaaaaaa

SEQ ID NO: 170 - DNA, 2222 bp, Homo sapiens
  CDS (100)..(1782)
tgagataaagacttaattcgggccacctcaggagctgccacccctgtcatagcatttttattatcaaatctggcactcacaagccctggccgacccccaatgggttttaccactccccctctagaccctgtcttgcaaaatcctctccctagccagctagtattttctgggctaaagactgtacaaccagttcctccattttatagaagtttactcactccaggggaaatggtgagtcctccaacctccctcccaaccagtcccatcattccaaccagtggtaccatagagcagcaccccccgccaccctctgagccagtagtgccagcagtgatgatggccacccatgagcccagtgctgacctggcacccaagaaaaagcccaggaagtcaagcatgcctgtgaagattgagaaggaaattattgataccgccgatgagtttgatgatgaagatgatgaccccaatgatggtggagctgtggtcaatgacatgagccatgacaatcattgtcactcccaagaggagatgagcccaggcatgtctgtgaaggacttttctaagcataacaggacccggtgcatttcaaggactgaaataaggagggccgacagcatgacttctgaagaccaagaacctgagcgggactatgagaacgagtctgagtcttcggagcccaaactgggcgaggaatccatggaaggggatgagcacattcacagcgaagtgagtgaaaaagtcctgatgaatagtgagaggcctgatgagaaccacagtgagccctctcaccaggacgtcatcaaggtgaaggaagaatttacagaccccacttacgacatgttttacatgagccagtatggactgtacaatggtgggggtgccagcatggccgccttgcatgagagctttacatcgtctctgaattatggcagccctcaaaagttctccccagaaggtgacctatgttctagcccagaccccaaaatctgttatgtgtgcaagaagagtttcaaaagctcctacagtgtgaaacttcactacaggaacgttcacttgaaagagatgcacgtctgcacagtggctggttgcaatgctgcattcccctctcgccgaagccgagacagacacagtgccaacataaacctacatcgtaaactgttgaccaaagaactcgatgacatgggcctggactcgtcgcagccctcccttagcaaggacctccgcgatgaatttttggtgaagatatatggtgcccagcaccccatggggctcgatgtcagggaagacgcctcctctcccgcagggactgaagactcccacctgaacgggtatgggagaggcatggcagaggactacatggtccttgacttgagcaccacctccagcctccagtccagcagcagtatccattcctccagagaatccgacgcaggcagcgatgaggggattcttctcgatgacattgacggggcgagtgacagtggggagtcggcacacaaggccgaggcccctgccctccctggcagcctaggggctgaagtttcaggatctcttatgttcagcagcttgtctgggagcaatggtgggatcatgtgcaacatttgccacaaaatgtacagcaacaaggggaccctgagagtgcactacaaaactgtgcatttgagagaaatgcacaagtgcaaagtcccaggttgcaatatgatgttttcctctgtacgaagccgaaatcggcacagtcagaaccctaatctccacaaaaacattcccttcacttcagtagattagtctcagaatggacactacaaatgccagctctcaccagatggcctacgtgtttgaactgccatagtcagtgtgcgcttatgtacttggggtgtgtgtgtgtgtgtgtgtgtgtgtgtgtgtgtgcatttatgtatgctctgtggctacatatacacacacgtatttccttgagataaacaagataaacactaggtgcttttgaatttttttcacttccctttatagttttgggaaaggagtgggatctttgatttcagggtgaaaacagagtacccctttaaacacacacacacacacatgcacatacacacacacacacacacacacacacagtgtgcaactagccccagttttgacagaataattcttggtcttccccaaagagacaatttgttgtacccatgactgttgcctgcaaaaataaaagggaaaaaaaa

SEQ ID NO: 171 - DNA, 1058 bp, Homo sapiens
  CDS (403)..(714)
ccaggaccgtcggagggcacagctctgtgacggcgctctctgtgtgtctcgcacctgccctgtgtggattcctggctttaactaaacgcagcctctcatcctcagcacgcgtgtcagaggaggaggagctggaggccctctcagtggccagcacctgccagcttgtctgggactctccagcagctgccgggaggcatcgtgtgtgtgtcacctgtcactccctggacggcaagtgccagctgaagcgcagagccctcgcccgcctactatgagttcatcggcgtcagcggctgccaggacgtgctgcacctgtaccgcctgctctgggcctctgcagttctgaacgtcctgggcctgttcctgggcatcatcaccgccgccgtcctgggggccttcaaggacatggtgcctctgtcccagctggcctatggcccagccgtcccaccacagaccctctacaaccccgcccagcagatcctggcctacgcaggcttccgcctgacgcccgagcccgtcccgacctgctcgtcctaccctctgccccttcagccctgcagccgcttcccagttgcgccctcctctgccctggcttcgtctgaggacctgcagcccccttctccaagcagctctggctctgggcttcccggccaggctccaccgtgctacgcacccacctactttcccccgggggagaagccacccccctacgcaccctgatagaggcgtggagtaaaagataacttgtttgtttttttttttaaaaaaaaggcagcctctagaaatcccgcttctgtggccaacctcctagagaacccgggagaatgttccagaagtctgtcccctcctttcctccctgggcacactggtgagggaggctggaaccaggcagggagtggggccctccagacccaggctggtgacaccttggcttgggctctgctcacatcaaatggcgctgaaagttcccacccggcctcctcctctgagagcaattgttctggtgttttcacatcccttaattaattagctattattatgattttgcaaaaaaaaaaaaa

SEQ ID NO: 172 - DNA, 3629 bp, Homo sapiens
  CDS (449)..(2044)
aggagaagatgtgccgccgctgccaacgtcgagcggcgacggctgggaaaaagatcttgaagaagctctggaagcaggaggttgtgatcttgaaacgttgagaaatataattcaaggaagaccgctgcctgctgatctgagggccaaagtttggaagattgctctgaatgttgcaggaaaaggtgatagtttggcatcatgggatggtattttagacttgccagaacagaacactattcacaaagattgcctgcagtttattgaccagctttcagtgccagaggagaaggcagcagaattacttttggatattgaatctgtaattaccttttattgtaaatcacgtaacattaaatatagcacatcccttagctggatacatctactgaaaccattggtgcatcttcaactgccacgcagcgatttatacaactgcttttatgccataatgaataagtacattcccagggattgttcccagaaagggagaccatttcatctcttcaggttgctcatccaataccatgagcctgagctttgttcttatcttgatacaaagaaaattactccagactcctatgcactcaactggcttggaagtctttttgcatgttactgttccactgaagtcactcaggcaatatgggatggatatctacaacaagcagatccattttttatttatttcttaatgttaattatccttgttaatgcaaaagaagttattttaacacaagagtcagacagcaaagaagaagttatcaagttcttggaaaatactccatccagtctgaatatagaagatatagaagaccttttctctctggctcagtattattgcagcaaaacaccggcttcttttaggaaggataatcaccatctctttggtagtactttgttgggaattaaggatgatgatgcagatctgagtcaggctctttgtctggccatctccgtgtcagagatccttcaagcgaatcagctacaaggggaaggagtccggttctttgtggtggattgccgtcctgcagaacaatataatgctgggcatttatcaactgctttccacttagattcagacctgatgcttcagaatccatctgagtttgcacagtcagtaaaatccttgctggaagcacagaagcagtccattgagtctggctccatagctggtggggagcacctctgttttatgggcagtggcagggaggaagaagacatgtatatgaacatggtcctggcacactttttacagaaaaacaaagaatatgtgagtattgccagtggaggatttatggcactgcagcagcacctggcagacattaatgtggatggaccagaaaatggatatggccattggattgctagtacctcaggctcaaggagcagtatcaattctgttgatggtgaatctcctaatggctcaagtgatagaggaatgaaatcactagtaaataaaatgactgtggctttgaagacaaaatccgttaatgtcagggaaaaagttatcagttttatagagaatacatcaactcctgtggatcggcatgtgagcagcagtgacagagtgggcaagccttaccgtggcgtaaagcctgttttcagcattggggatgaagaagaatacgacacagatgaaattgacagttcttcaatgtcagatgatgatagaaaagaggttgtaaacattcagacttggataaacaaaccagatgtcaaacatcattttccttgtaaagaagtaaaagaaagtggacacatgtttcccagtcatctgttggttactgcaacacatatgtactgtttaagggagattgtttcacggaaaggattggcttatatacagtctcgacaagcgctgaattctgtagttaaaattacatccaaaaaaaaacatcctgaactcattaccttcaagtatggaaatagcagtgcttcaggaatagaaatcttggcaatcgaaaggtatttgattccaaatgcaggggatgcaactaaagccataaaacagcagatcatgaaagttttggatgctttggaaagttaatataaaagaaaattatataaaaagaaattaagacaaccaagagaaacatggacatatacctcctgactgaatactaactggagacctttcatttgctcatggggctgcttaaatagcaggtctaagaaagtgtaaattattataatcaatctgtggacagtaaactttttaaaaatttttcttctgcatttttggttttataaaatgatgtattataaaggtcagttattaaattactttgaagtaactgaccctgtgcccttatggactaagtaagggtacagaatgcagttctgttttgaagagctgttttaagggaacatgcatcactttcgggttcaaaaacaactgtacacatacatatctgcagtgtcttcactgaaaattagagatagaattagttgaagagacttccttaattgctacattgttttactcactgagcaatatcagaaactaaaacatagattaataattcactcactgtttctattcttcttaaaaagagtgaaatctttttaatggaatggttgaagattcctgccaactcaaaatacagtacagctagtaaaatgttgaaacatcagtttctaaatcacctttgctccattagctaattttttggacactaaatgcttcaaagataagaaacttcatcctaatgatttctaaagagcagttaaaagcattaaaataagtaggtaggctgttaagattaaaattaacattttggggacagaattgtgtctgtaaaaatgtcattggttttattacaagtggattattttattcatattttaaaacaaatgtttaagccacattgatttatcctcattgaggattatggtctgtgaccacagtaatatccacttatataaatgccaaataatcagagagcttataaagtacaattgtttttgtcatcattttctgaatttctttctcttcttttggttttgtcctctcattgaagttccagtggtttgaaattagttttggacacattgtcttaatgtactgaaaattgctctgctgtattttgcagcgttcttcatttaatttataatggtccatattagacacatttggtaagagaagtccaggaacacatttagggccatggaatagtattttgtaaaatccatttgggaagttgcaatacccacaatctgacatgtcctaaaatgtaagggattatctctaaggggttgatgggagaaatatttagatgtaccctgttaacagccagtcattttgatttacttatggaaatcaagtgaataaaaggcaacataatttgggaaattttattctaatatctaataaaaacagtttgagtggttgaagacatctgcatgaaattgcacctaggtgcattacttgatataactctcccctaaaactgttgtaattgcattttttcccttttcttggcacccctttagaaatgtactgaagtctcatttttcacccatttcagccatgggacatttttcataatattaatgtaaagatgtttgtgttactgtttataaattacaattgtaaataaattactagtttgcccaaaaaaaaaaaaaaa

SEQ ID NO: 173 - DNA, 1810 bp, Homo sapiens
  CDS (71)..(1180)
taagcttgcggccgcctctgctctcagtgccccggatcggaggccgtccatcgcccctcgggccgacgccatgaagatcaaagatgccaagaaaccctctttcccatggtttggcatggacattgggggaactctagtaaagctctcgtactttgaacctattgatatcacagcagaggaagagcaagaagaagttgagagtttaaaaagtattcggaaatatttgacttctaacgtggcatatggatccaccggcattcgggatgtacaccttgaactgaaagatttaacactttttggccgaagagggaacttgcactttatcaggtttccaacccaggacctgcctacttttatccaaatgggaagagataaaaacttctcaacattgcagacggtgctatgtgctacaggaggtggtgcttacaagtttgaaaaagattttcgcacaattggaaacctccacctgcacaaactggatgaacttgactgccttgtaaagggcttgctgtatatagactctgtcagtttcaatggacaagccgagtgctattattttgctaatgcctcagaacctgagcgatgccaaaagatgccttttaacctggatgatccctatccactgcttgtagtgaacattggctcaggagtcagtattttagcagtccattccaaagacaactataaacgagtgactgggacaagccttggagggggtacctttctgggtttatgcagtttattgactggctgtgaaagttttgaagaggctcttgaaatggcatccaaaggtgatagcacacaagctgacaagctggtccgtgatatttatggaggagattatgaaagatttggtttgccaggttgggctgtagcatctagttttgggaatatgatttataaggagaagcgagaatctgttagtaaagaagatctggcaagagctactttagttactatcaccaataacattggttctgtggcacgaatgtgtgctgttaatgagaaaataaacagagttgtctttgttggaaactttttacgtgtcaataccctctcaatgaaacttttggcatatgcactggattactggtcaaaaggtcaactaaaagcattgtttctagaacatgagggttactttggagcagttggtgcacttcttgggctgccaaatttcagctaaagcatcaggtctctctctctgctaataaatgtcatccaagaggaactaaaaccagaggcattattactgcattgtttgtcactgggaaccaaaggataaaagagtagcataagctgctgaatgttgccatattaaaggagagaacttggtaacgtgaagtatttctcattgaaatgctttcccttttgtatatagccagtgttaaatccttaaatgcaatacagcctctgattattgagcttcctcttaaaaagatttttttattttatgtagccaacattgcagtactgtatgctcaaacacaaatcttaaagtatcggaactgtttagcttatgaaaataatcgactctgaatatttgttacaagtctgttttatgtgttttgattactagtgagcagaaaataacataccctgtattcaaaattactgaaatggcaatcaaagatgatcatttttatgtgattttagaaatgttaaggcaatactactaattattgtaggtttttttaacgtatcacccaaagcatgtatgtgatctttccccattagtatctttttctcaaatgccataattaactgaaatactattattaaattttcatgagaattctaaaaaaaaaaaaaa

SEQ ID NO: 174 - DNA, 1753 bp, Homo sapiens
  CDS (153)..(1172)
caccgatttatggtgctgacatcagtggctccttgtttgatgaaaacactaaacaatggaatcttgggcacctgggaacaattcaggacctgctggaaaaggaatgtggggttgtcatagaaggcgtcaatacaccctacttgtactttggcatgtggaaaaccacgtttgcttggcatacagaggacatggacctttacagcatcaactacctgcaccttggggagcccaaaacttggtatgtggtgcccccagaacatggccagcgcctggaacgcctggccagggagctcttcccaggcagttcccggggttgtggggccttcctgcggcacaaggtggccctcatctcgcctacagttctcaaggaaaatgggattcccttcaatcgcataactcaggaggctggagagttcatggtgacctttccctatggctaccatgctggcttcaaccatggtttcaactgcgcagaggccatcaattttgccactccgcgatggattgattatggcaaaatggcctcccagtgtagctgtggggaggcaagggtgaccttttccatggatgccttcgtgcgcatcctgcaacctgaacgctatgacctgtggaaacgtgggcaagaccgggcagttgtggaccacatggagcccagggtaccagccagccaagagctgagcacccagaaggaagtccagttacccaggagagcagcgctgggcctgagacaactcccttcccactgggcccggcattccccttggcctatggctgcccgcagtgggacacggtgccacacccttgtgtgctcttcactcccacgccgatctgcagttagtggcactgctacgcagccccgggctgctgctgtccacagctctaagaagcccagctcaactccatcatccacccctggtccatctgcacagattatccacccgtcaaatggcagacgtggtcgtggtcgccctcctcagaaactgagagctcaggagctgaccctccagactccagccaagaggcccctcttggcgggcacaacatgcacagcttcgggcccagaacctgagcccctacctgaggatggggctttgatggacaagcctgtaccactgagcccagggctccagcatcctgtcaaggcttctgggtgcagctgggcccctgtgccctaagtccacgggctgtctttatatcccactgccctgctgtgtgacagtttgatgaaactggttacatttacatcccaaaactttggttgagtttgcaggactctaggcatgcatgaaagagcccccctggtgatgcccttggatgctgccaagtccatggtagttttcaattttgccatacttttgttcttcctaccggaccctggaatgtctttggatattgctaaaatctatttctgcagctgaggttttatccactggacacatttgtgtgtgagaactaggtcttgttgaggttagcgtaacctggtatatgcaactaccatcctctgggccaactgtggaagctgctgcacttgtgaagaatcctgagctttgattcctcttcagtctacgcatttctctcttcccctccctcaccccctttttcttataaaactaggttctttatacagataaggtcagtagagttccagaataaaagatatgacttttctgagttatttatgtacttaaaatatgttgtcacagtatttgttcccaaatatattaaaggtaaccaaaatgttaaaaaaaaaaaa

SEQ ID NO: 175 - DNA, 1042 bp, Homo sapiens
  CDS (70)..(1017)
cgagtgggtccctgccgctgcgtgggggtgaggggatcagtctggtggaaaggacagaggactaagtccatggactggaaattggaagggagtactcagaaagtagagtcacctgtgctgcaggggcaagaaggcatcctagaggagacaggtgaagatggacttcctgaaggcttccagcttctgcagatcgatgcggaaggcgagtgccaggagggagagatcctggccacaggcagtacggcatggtgctcgaaaaatgtccagagaaaacagagacactgggaaaagatagttgcagcaaagaagagcaaaagaaagcaagaaaaagaacgaagaaaagccaatcgtgcagaaaatccaggcatttgcccccagcacagcaaacgtttcctgagagctctaaccaaagacaaacttttggaagccaaacactcaggaccaagactatgtatcgatttgagtatgacccactacatgtcaaagaaggaattaagtagactggctggacagattcgaaggttgtatggttcaaacaaaaaagctgacaggccattttggatctgcctcactggattcacaacagacagtcccctttatgaagagtgtgtgaggatgaatgatggattttctagttacctgttagacataacagaagaagactgctttagtttatttcccttggaaacccttgtgtacctgactcctgactcagaacacgctcttgaagatgttgatctaaacaaagtttacatcctcggtgggcttgtggatgaaagcattcagaagaaggtgacatttcaaaaggcccgggaatactctgtcaagaccgcacgcttgccaatccaggaatacatggtcagaaaccagaatgggaaaaactatcattcagagatactggccatcaatcaagtgtttgatatcctgtccacttacttagagactcacaactggcctgaagcattgaagaaaggagtttcttcaggaaaaggctatattcttcggaactcagtggaatgatgggcctaagattgcagctgcg

SEQ ID NO: 176 - DNA, 1569 bp, Homo sapiens
  CDS (457)..(1359)
atgatctctgatcaaggacagttaactcaccacctgacttctgcaaacacgcttaacaaagactttttttgtggaggacgattggggcctgtgcagacctggtatcagccaccagcatttcagtgcaagggtttagcggcggcggacggagaggggcctctgctacccaagaagcagaagcggccggcgacgcgtcgcaggctggtgcactatctgaagggccgggaggtaggagcgcggggcccagccgggctccagggcttcgagggcgagctgcggggctacgccgtccagaggctgcccgagctgctgacggagcgccagctggacctgggcaccctcaacaaggtgttcgcgtcacagtggctgaacgccaggcaggtggtgtgcggcaccaagtgtaatacgctgtttgtggtggacgtgcagtcaggccacatcacgcgcatccccctcatgcgggacaaggaggccgggctggcccaggcccaccagggctgcggcatccatgccatcgagctgaatccctccaagacgcttctggccaccggcggcgaaaaccccaacagcctggccatctaccagctgcccaccctggaccccctgtgcctgggcgaccgccatggccacaaggactggatcttcgcagtcgcctggctgagtgacaccgtagctgtgagcggctcccgcgacggcaccgtggctctgtggcggatggacccagacatgtttaatggcagcattgcctggcacagcgaggtgggtctcccagtatatgcccacatccgtccgagggatgtggaggccatccccagggccagcaccaaccccagcaaccgcaaggtacgggccctggccttcagcggcaagaaccaggagctgggagcggtgtccttggacggctacttccactgtgatgagttgtccctgtacgctgtgggctctcagtcccacgtctccttcctggatccgcgccagcgccagcagaacatccggcccctgtgctctcgagagggtggcacaggcgtgcggtcgctgagcttctaccagcacatcatcactgtgggcaccggccatggttccctgctcttctatgacatccgcgcccagaagttcctggaggagagggcctcttccagcctggactccatgccggggcccgcagggaggaagctcaagcttgcctgcggcagaggctggctcaaccaagatgacgtctgggtgaactactttggtggcatgggagagttccccaatgcgctctacacccactgctacaactggccggagatgaagctctttgtggctggggggcctctcccttcaggcctccatgggaactacgcaggcctctggagttaaggatggacgccttgttctcaaagtgcacaggtggaaccagtccaacttacgtgtgcttaatgtattaggcagagaaagaaagagagagagcgggagcgagagagcacaagtggtcctttcggcagtcaaaactttggctttaaaactctcattcacgtttcccaacagcagtatatttttgccttctcattcacagagttttggcta

SEQ ID NO: 177 - DNA, 1809 bp, Homo sapiens
  CDS (79)..(1695)
cggcacgagggggggttgtcggtctataagcctcgcccgttccgctccctggggcttccccgagcgccgtcggtggtcatggctgccccagcctcccggcaggtccgacgcagagcccgggcagcgccgcggccccgctcggccgaggactggtggtgggaccggctggcgccgaggggctcggggtaccacctgctgcagtccgacagcatgctgctggtgctgtccgaacccggccccgcccggccccgcgcacagcggcgcgcttcccgccgcactccccggcagccgccccggggccccagcgccgcggccaagcccaaggccgggctcaggtccgaggcggcggccgcgcccgcacccgcaccggcacccacgcccacgcccgaggaagggcccgacgcgggctggggagaccgcattcccttggaaatcctggtgcagattttcgggttgttggtggcggcggacggccccatgcccttcctgggcagggctgcgcgcgtgtgccgccgctggcaggaggccgcttcccaacccgcgctctggcacaccgtgaccctgtcgtccccgctggtcggccggcctgccaagggcggggtcaaggcggagaagaagctccttgcttccctggagtggcttatgcccaatcggttttcacagctccagaggctgaccctcatccactggaagtctcaggtacaccccgtgttgaagctggtaggtgagtgctgtcctcggctcactttcctcaagctctccggctgccacggtgtgactgctgacgctctggtcatgctagccaaagcctgctgccagctccatagcctggacctacagcactccatggtggagtccacagctgtggtgagcttcttggaggaggcagggtcccgaatgcgcaagttgtggctgacctacagctcccagacgacagccatcctgggcgcactgctgggcagctgctgcccccagctccaggtcctggaggtgagcaccggcatcaaccgtaatagcattccccttcagctgcctgtcgaggctctgcagaaaggctgccctcagctccaggtgctgcggctgttgaacctgatgtggctgcccaagcctccgggacgaggggtggctcccggaccaggcttccctagcctagaggagctctgcctggcgagctcaacctgcaactttgtgagcaacgaggtcctgggccgcctactccacggctctcccaacctgcgcttactggatcttcgtggctgtgcgcgcatcacgccggctggccttcaggatctgccatgtcgggagctggagcagcttcatctgggcctgtatggcacgtcagaccggctgactctagccaaggagggcagcccctttttgacccagaagtggtgccatacactgcgagaactggacttgagtggccaggggttcagtgagaaggacctggagcaggccctggctgccttcttaagcacccctgggggctcacacccagccctgtgctctcttaacctcaggggcacccgggtcacaccaagcactgtcagctctgtgatcagcagctgcccgggcctgctctacctcaacctggagtcctgccgctgccttccccggggtctgaagcgggcctaccggggcctggaggaagtccagtggtgtctggagcagctgctcaccagcccctcacccagctaggcagccacagacctgggacacctcagccagcttgcccaccctccacctttgcccaatttcagatatttgagcattttgttaaaataaaacatttttaggaaaaaaaaaaaa

SEQ ID NO: 178 - DNA, 1401 bp, Homo sapiens
  CDS (106)..(822)
ggactaagccggggagcgcatcccggctactgcgggtcctgggtcttcacctgcggagccttacggcagctgagcggtgggagggacctgagccgcggcgctaggatgggaaacagtgcgctccgcgctcatgtggaaacggcgcagaaaactggtgtctttcagcttaaggaccgagggctgaccgagttccccgcagacttgcagaagctgacgagcaatctcaggaccatcgacttgtccaacaacaagatcgaaagcctaccgcctttgctgataggaaagttcactctgctgaagagcctctccctgaacaacaacaaactgactgttctgcctgatgagatatgcaatctgaaaaaactagagacgctaagcctaaacaacaatcaccttagagagctgccgtctacctttgggcaactctctgccctcaagaccctgagcctctctgggaaccaactgggagcattacctccccaactttgtagcctacggcacctggatgtgatggatctctctaagaaccagattcgaagtatacctgactcagtgggagagctgcaagtcatcgaactcaacctcaaccagaatcagatatctcagatctcagtgaagatatcttgctgtccacgccttaaaattcttcgcctggaagagaattgtcttgagctcagcatgcttccccagagcatcctcagtgattcccagatctgtctgcttgctgtggaaggcaatctttttgaaataaagaaacttcgagaactggaaggctatgataagtacatggagaggttcacagccaccaagaagaagtttgcgtgaagttctccaggactatggaaaccttacaggatactgacttagaacctctgttggaatgtggctgagtcaaagcctcctgttgttgttaggggtatctacagtaaggagatgatacttcaggagattatatttcactcaatgatcttttctcatttcagggctcttctcaaataagctaaaagaaaaaggatcaggagacaggaaaagtcttccgttttgagtcatgagtagggcaatagacaaggttctcttcaaaaccatcattagtttggctttaagaaaccagtagctagctgctatttatatggtgagggggtgctgcctggtaacagaatagctccacaccacagcttgagattttgtttagtttcactgtgtgagctttcataaagtctgttgccattccatctctgtgttaacacttcatatttttatgaaattcagataatttgtgagaggctggcatggatctaaggatttattatttttattctagtccatcagttcagtcgcagtttttatactaggactttaggatgtacataaatgtgtgactgtttgtcttgattaaaagtg

SEQ ID NO: 179 - DNA, 1430 bp, Homo sapiens
  CDS (108)..(650)
ggcacgagggtgggcactggaaacgtgtggccagaaggggaaacgctcgggcctttggtgggggccagcctggggtggggtcggccagggtcagctgcctttccttcatgctggggaggagatgttgtgtgcatgtgagaaagcatttgatagcatgccaaaagtttcctccattatgtgcgtgtcaagtgtttgaccaggtcagaactcttgttctatgcgaatgtgctcacgcagacagaagcggaggggctccgtcgctctgccctcacgccgctgaaccgcgagggtctcccgctcctcaggcttgcggctcggccgcgaagtgtgtcaggtgtgcatcctgggtgctcctttgtgctctgtcctacggtgacacaggcggcgtggggttagacaggtaccggtcatactacggtgacacaggcggcgtgcggttagacaggtaccggtcagattacggtggcacaggcggcgtggggttagacaggtaccggtcagattacggtgacacaggcggcgtggggttagacaggtaccggtcagattacggtggcacaggctgcgtggggttagacaggtaccggtcagattacggtggcacaggcggcgtggggttagacaggtactggtcagatgcacgggctccctaaacccctgctgtggcttcggcagtaaagacaggacgcacccatgtcacaagaggagcacaggcaggggtgttggtgttggggcagccctcagggtctccagaccccagccccactcacacagcagcctaggaaggaagggcagagtcccaggtgtcagctggtgggtctcccaggagctgcccctccctggaagtcacaggacaggaatgacagatcagggaactgcaggaagctgccacctctggggtcagaatatgcccagcctgcgggggctctctatcggggtcttcgagagccagacagcctgccttgtgctgcatacctggctttgctctgtgcagaacccagcacacgtgattttgtgtgacatgccagcagcctggctcccaggacaggaggcctgccctgggggaggggctgcaggaggagggggggcaggcacccatgagtctgtccagccttgtcacagatgcatcgcccagcctgcggtcctgatttcagctcacctcagagtaaatcagaataaactgcacccagactttcacgaatgcatgttgacgctttcagttcacccctttctttgctaactttcttcctattttcttctaatgcgagagcttattaattccatatttatcattttgaataacttttctcctttttagtaacaaaatgtacttcactcttagtaaaatgtatttactattttagtaacaaaaatatacttgcctaatcatgtttaaaatatagtgatgtgaaaaattcaaaaaaaaaaaa

SEQ ID NO: 180 - DNA, 2783 bp, Homo sapiens
  CDS (418)..(2268)
ccgtgccggaattgccgcgacgacccacgcgtacgacgacatccgaaacctcgagctgagtctgagggttggccccactcagatgcaccagcctcttggactgtatatttacacattcacacaccatcaccctttctaacttctgggactctttgcgcaactgctaggatctctcaagtgcatgtggcaacacagcccagctccgggcggaaaccagcagggctctggaggggctcggagaccaggcgagctgtcaaggctgcggcggggaccagagaggagcctggcgggggtggctgggtggctgggggaatccccccaacttcccatcgcaggcgcagctctctcggccgcctatttcctccgaaacccgcgctgcggagcagcccagtgcatagagttcaacacttccccttgatgtggaaagtaaaggagcctcactaccacctttttttctttgcgttttcttactgctggtcctgggagccttttccttcggagcagcagccctgtccggcatctgtcttgagctcccagcaaggaaagtccatcagcttgataatggaggagaacaatgactccacggagaacccccaacaaggccaagggcggcagaatgccatcaagtgtgggtggctgaggaagcaaggaggctttgtcaagacttggcatactcgctggtttgtgctcaagggggatcagctctattatttcaaagatgaagatgaaaccaagcccttgggtactatttttctgcctggaaataaagtttctgagcatccctgcaatgaagagaacccagggaagttcctttttgaagtagttccaggaggcgatcgagatcggatgacagcaaatcatgaaagctacctcctcatggcaagcacccagaatgatatggaagactgggtgaagtcaatccgccgagtcatatggggacctttcggaggaggcactgtggtggtccagcagttgatgtcagtgatgattagcaaacatgattgcctctttcccaaagatgcagaactacaaagcaagccccaagatggagtgagcaacaacaatgaaattcagaagaaagccaccatggggcagttacagaacaaggagaacaataacaccaaggacagccctagtaggcagtgctcctgggacaagtctgagtcaccccagagaagcagcatgaacaatggatcccccacagctctatcaggcagcaaaaccaacagcccaaagaacagtgttcacaagctagatgtgtctagaagcccccctctcatggtcaaaaagaacccagcctttaataagggtagtgggatagttaccaatgggtccttcagcagcagtaatgcagaaggtcttgagaaaacccaaaccacccccaatgggagcctacaggccagaaggagctcttcactgaaggtatctggtaccaaaatgggcacgcacagtgtacagaatggaacggtgcgcatgggcattttgaacagcgacacactcgggaaccccacaaatgttcgaaacatgagctggctgccaaatggctatgtgaccctgagggataacaagcagaaagaacaagctggagagttaggccagcacaacagactgtccacctatgataatgtccatcaacagttctccatgatgaaccttgatgacaagcagagcattgacagtgctacctggtccacttcctcctgtgaaatctccctccctgagaactccaactcctgtcgctcttctaccaccacctgcccagagcaagacttttttggggggaactttgaggaccctgttttggatgggcccccgcaggacgacctttcccaccccagggactatgaaagcaaaagtgaccacaggagtgtgggaggtcgaagtagtcgtgccaccagtagcagtgacaacagtgagacatttgtgggcaacagcagcagcaaccacagtgcactgcacagtttagtttccagcctgaaacaggaaatgaccaaacagaagatagagtatgagtccaggataaagagcttagaacagcgaaacttgactttggaaacagaaatgatgagcctccatgatgaactggatcaggagaggaaaaagttcacaatgatagaaataaaaatgcgaaatgccgagcgagcaaaagaagatgccgagaaaagaaatgacatgctacagaaagaaatggagcagtttttttccacgtttggagaactgacagtggaacccaggagaaccgagagaggaaacacaatatggattcagtgagcctgctttcgcctgctgtctctgatggctctggcaaggactccagggattctggtgggatatgacttagaaccaggtggctggtcacctggatgtacagaagtctaactggtgaaggaatatcatttacagacattaaacatccatatctgcaatgtgtaccaaagttatatcatgccccataatgctactgtcaagtgttacaactggatatgtgtatatagagtagtttttcaaaagtaaactaaaaatgagaagcatatttcaagaattattttattgcaagtcttgtatttaaatgttaaatcaatatgttgttgcaatttagcttgctttcaagcttcaccccttgcacttaacataagctatttttggcattgtgttatcatcggcttattttatagatcaatatttttatttcccttttttgctgaggaaatgaagataagcaaaaatataaatatatatataaatatatgagttattaaaatcagaagaataaaaaaaaaaaa

SEQ ID NO: 181 - DNA, 1256 bp, Homo sapiens
  CDS (1)..(1203)
atgaaagagaatttcaaacacaggcacgtggtggcgttcattagcagtcaggaagctcaggaagattcaagagaggaagaagaccgactggagtctcggttttactttctttttctcttggagctgagctataagacaacaggactgaacagggagccaactgtttctttgaacagtaaatcaggaacaccaatggaccaaaatgaacacagtcactggggaccacatgcaaagggccaatgtgccagcagatctgagctgagaatcatcctggtgggcaaaacaggaactggcaaaagtgctgcagggaacagcatcctcaggaagcaagcatttgaatcgaagctgggttcccagaccttgactaagacttgcagcaaaagtcagggaagctggggaaatagagagattgtcattattgacacaccagatatgttttcttggaaggaccactgtgaagctctgtacaaagaggtgcagaggtgctacttgctctctgcaccaggaccccatgtgctgctcctggtgactcagctgggccgctatacctcacaggaccagcaggctgcacagagggtgaaggagatctttggagaggatgccatgggacacacaattgtcctctttacccacaaggaagacctcaatggtggctccctgatggattacatgcacgactcagataacaaagccctaagcaagctggtggcagcatgtggtgggcgaatctgtgcctttaataaccgtgctgaagggagcaatcaggatgaccaagtgaaggaactaatggactgtattgaggatctgttgatggagaaaaatggtgatcactataccaatgggttgtacagcctaatacagaggtctaaatgtggacctgtgggatcagatgaaagagtaaaggaattcaaacagagccttataaagtacatggaaactcaaagaagttacacagccttggctgaagcaaactgcctaaaaggagccttaatcaaaacacaactgtgtgttttattttgtattcagttgtttctcagattgataattctgtggctttgcatactgcacagcatgtgcaatttgttttgttgcttactctttagtatgtgcaatttattctgcagtttgctgtttattatacccaaaaagttaatgatatttttgagaacagttattagactagaacgcaagactcctaggttatagttacagatcccagttattatttactcactatcatttagtgggtgaatcac

SEQ ID NO: 182 - DNA, 2051 bp, Homo sapiens
  CDS (1)..(1743)
atgtgggggcgcacggcgcggcggcgctgcccgcgggaactgcggcgcggccgggaggcgctgttggtgctcctggcgctactggcgttggccgggctgggctcggtgctgcgggcgcagcgtggggccggggccggggctgccgagccgggacccccgcgcaccccgcgccccgggcggcgcgagccggtcatgccgcggccgccggtgccggcgaacgcgctgggcgcgcggggcgaggcggtgcggctgcagctgcagggcgaggagctgcggctgcaggaggagagcgtgcggctgcaccagattaacatctacctcagcgaccgcatctcactgcaccgccgcctgcccgagcgctggaacccgctgtgcaaagagaagaaatatgattatgataatttgcccaggacatctgttatcatagcattttataatgaagcctggtcaactctccttcggacagtttacagtgtccttgagacatccccggatatcctgctagaagaagtgatccttgtagatgactacagtgatagagagcacctgaaggagcgcttggccaatgagctttcgggactgcccaaggtgcgcctgatccgcgccaacaagagagagggcctggtgcgagcccggctgctgggggcgtctgcggcgaggggcgatgttctgaccttcctggactgtcactgtgagtgccacgaagggtggctggagccgctgctgcagaggatccatgaagaggagtcggcagtggtgtgcccggtgattgatgtgatcgactggaacaccttcgaatacctggggaactccggggagccccagatcggcggtttcgactggaggctggtgttcacgtggcacacagttcctgagagggagaggatacggatgcaatcccccgtcgatgtcatcaggtctccaacaatggctggtgggctgtttgctgtgagtaagaaatattttgaatatctggggtcttatgatacaggaatggaagtttggggaggagaaaacctcgaattttcctttaggatctggcagtgtggtggggttctggaaacacacccatgttcccatgttggccatgttttccccaagcaagctccctactcccgcaacaaggctctggccaacagtgttcgtgcagctgaagtatggatggatgaatttaaagagctctactaccatcgcaacccccgtgcccgcttggaaccttttggggatgtgacagagaggaagcagctccgggacaagctccagtgtaaagacttcaagtggttcttggagactgtgtatccagaactgcatgtgcctgaggacaggcctggcttcttcgggatgctccagaacaaaggactaacagactactgctttgactataaccctcccgatgaaaaccagattgtgggacaccaggtcattctgtacctctgtcatgggatgggccagaatcagtttttcgagtacacgtcccagaaagaaatacgctataacacccaccagcctgagggctgcattgctgtggaagcaggaatggatacccttatcatgcatctctgcgaagaaactgccccagagaatcagaagttcatcttgcaggaggatggatctttatttcacgaacagtccaagaaatgtgtccaggctgcgaggaaggagtcgagtgacagtttcgttccactcttacgagactgcaccaactcggatcatcagaaatggttcttcaaagagcgcatgttatgaagcctcgtgtatcaaggagcccatcgaaggagactgtggagccaggactctgcccaacaaagacttagctaagcagtgaccagaacccaccaaaaactaggctgcattgctttgaagaggcaatcattttgccatttgtgaaagttgtgttggatttagtaaaaatgtgaataagctttgtacttattttgagaactttttaaatgttccaaaataccctattttcaaagggtaatcgtaagatgttaacccttggtatttagaaaattaaaaccttataatatttttctatcaaaaaaaaaaaa

SEQ ID NO: 183 - DNA, 589 bp, Homo sapiens
  CDS (32)..(532)
gggagccctagggcactgggtcttcagtggcatgggggtgaagcggagcctccagagtgggggcattctgctcagcctcgtggccaacgtcctcatggtgctctccacggccaccaactactggacccgccaacaagagggccacagtggcctgtggcaggaatgcaaccacggcatctgctccagcatcccctgccagaccacgctggcggtgactgtggcgtgcatggtgctggcggtgggtgtcggcgtggtgggcatggtgatgggactgcggattcggtgcgacgagggcgagtcgctgcggggccagaccacgagcgccttcctcttcctcggcggactgctgctgctgaccgccttgataggctacaccgtgaagaatgcgtggaagaacaacgtcttcttctcttggtcctatttttctgggtggctggccttacccttctcaattctcgcgggcttctgctttctgctggcagacatgatcatgcagagcaccgacgccatcagtggattccccgtgtgtctgtgactgcagcctgcctggggcagaataaaggaacggctttttttaaaaaaaaaaaaa

SEQ ID NO: 184 - DNA, 2715 bp, Homo sapiens
  CDS (661)..(2712)
tttcgtggcgggtagcatgtgcgggagactcacgttgccggcgaagtgggagagagaaaagtggtaacctggggctgggggccggcgcggcggagctcggagtagtagagcggagtgaagacacgggggaggatagagactggcattcctttgggccgggggattggcgggagtcgtgctgggtgctctcgccgtgttgaggtcccagtgaggggaaggagaagcggaagagggtctctagtcggggcctagggcaaagggactacaaaaaggatgcagatgactatagaaatgaggacgacgaggagatgctgtggaggagcagtagaggtgagaagatgatgcaaagaaactgtgtcagtgaggaactgtatagagggtcatagaggtgaggtggcggagagaaactaactaacggaccatagaggtgggggagccattgtagaaggacgtggacgcgaaagggtcgtgtagatgggcatatgtgtgaagcagcaacgtagaggggctgaagaggagaaattcatggagagaaagaatgcacctagagtgagctctgcagagtgctgcgtgggatatccctagagtttggtctagtgaaggcacgctaaccaggcacctaaggcatttcaagtagtgacttcccacatttggctaggaatgtgggtcctcctccgaagtgggtaccccctccgtatcttgttacccctgcgtggggagtggatgggtcggaggggcctgccccgaaacttggccccaggccctcctcgcagacgttacaggaaggagactctccaagccttggatatgccagtgttgcctgtaactgcaactgaaatccgccagtatttgcgggggcatgggatccccttccaggatggtcacagttgcctgcgggcactgagcccctttgcagagtcttcacagctcaaaggccagactggtgttaccacttccttcagcctcttcattgacaagaccacaggccactttctctgcatgaccagcctagcagaagggagctgggaagacttccaggccagcgtggaggggcgaggggatggggccagggaggggtttctgcttagcaaggcaccagaatttgaggacagcgaggaggtccggaggatctggaaccgagcaatacctctctgggagctgcctgatcaggaggaggttcagctggctgatacaatgtttggccttaccaaggttacagatgacacactcaagcgtttcagtgtgcgatatctgcgacctgctcgcagtcttgtcttcccttggttctcccctgggggctcaggattacgaggcctgaagctcctagaggctaaatgccagggggatggagtgagctacgaggaaaccactattccccgacccagcgcctaccacaatctgtttggattaccactgattagtcgtcgagatgctgaggtggtactgacgagtcgtgagcttgacagcctggccttgaaccagtccacggggctgcctacccttactctaccccgaggaacgacctgcttaccccctgccttactcccttacctggaacagttccggcggattgtattctggttgggggatgaccttcggtcctgggaagccgccaagttgtttgcacgaaaactgaaccccaaacgatgcttcttggtgcgaccaggagaccagcaaccccgtcccctggaggccctgaacggaggcttcaatctttctcgtattcttcgtaccgccctgcctgcctggcacaagtccatcgtatctttccggcagcttcgggaggaggtgctaggagaactgtcaaatgtggagcaagcagctggcctccgctggagccgctttccagacctcaatcgtatcttgaagggacatcgaaagggcgagctgacggtcttcacagggccaacaggcagtggaaagacgacattcatcagtgagtatgccctggatttgtgttcccagggggtgaacacactgtggggtagcttcgagatcagcaatgtgagactagcccgggtcatgctgacacagtttgccgaggggcggctggaagatcaactggacaaatatgatcactgggctgaccgctttgaggacctgcccctctatttcatgactttccatggacagcaaagcatcaggactgtaatagatacaatgcaacatgcagtctacgtctatgacatttgtcatgtgatcatcgacaacctgcagttcatgatgggtcacgagcagctgtccacagacaggatcgcagctcaagactacatcatcggggtctttcggaagtttgcaacagacaataactgccatgtgacactggtcattcacccccggaaagaggatgatgacaaggaactgcagacagcgtccatttttggctcagccaaagcaagccaggaagcagacaatgttctgatcctgcaggacaggaagctggtaaccgggccagggaaacggtatctgcaggtgtccaagaaccgctttgatggagatgtaggtgtcttcccgcttgagttcaacaagaactccctcaccttctccattccaccaaagaacaaggcccggctcaagaagatcaaggatgacactggaccagtggccaaaaagccctcttctggcaaaaagggggctacgacacagaactctgagatttgctcaggccaggcccccactcccgaccagccagacacctccaagcgttcaaagtga

SEQ ID NO: 185 - DNA, 1749 bp, Homo sapiens
  CDS (49)..(1503)
tttcgtaggtcttcccgccacactccagagcggatgtgaggggcgccgatggcggagggaacggcggaggctcctctagagaatggtggtggtggcgactcgggagccggagctttggaacgaggagtggcgcccattaagcgtcaatacctcaccaccaaggagcagtttcaccaattcctggaagccaaagggcaggagaagacttgccgggaaaccgaggtaggagaccctgctggcaatgagctggctgagcctgaggctaagcggatccgactggaggatggacagacggcggacgggcagacggaggaggcagcagagcccggggagcagctacagactcagaagagggcccggggacaaaacaagggccggccccatgtgaagcccacgaactacgacaagaacaggctgtgtccctccctaatccaggagtcggctgctaagtgtttcttcggtgatcgctgccgctttctgcacgacgtggggcgctacctggagaccaagccggccgacctgggcccccgctgcgtgctcttcgagaccttcggccggtgcccctacggcgtgacctgccgcttcgctggggcccacctgaggcccgagggacagaacctggagcaggaggagttggcggcccgcgggacccagcccccgtccatccgcaacggcctggacaaagccctgcagcagcagctgcggaagcgcgaggtccgcttcgagcgagctgagcaggccctgcgccggttcagccagggccccacacccgctgccgctgtccccgagggcacggcagccgagggcgctcccaggcaggaaaactgtggtgcccagcaggtccccgcagggccgggcactagcacccctcccagcagccccgtgcggacctgcgggcccctgacggatgaggacgtggtcaggctgcggccctgtgagaagaagcggctggacatccgtggcaaactttacctggcccccctcaccacgtgtgggaacctgcccttccgacggatctgcaagcgcttcggggcggatgtgacatgtggagagatggccgtctgcaccaacctgctgcagggccagatgtccgagtgggccctactcaaacgccaccagtgtgaggacatctttggcgtccagctggagggcgccttccccgacaccatgaccaagtgtgccgagctgctgagccgcaccgtggaggtggactttgtggacatcaacgtcggctgccccatcgacctcgtgtacaagaagggtgggggctgtgccctcatgaatcgctccaccaagttccagcagatcgtccgtggcatgaaccaggtgctggatgtgccgctgactgtgaagatccgcacaggcgtccaggagcgtgtgaacctggcgcaccgcctgctgcccgagctgcgggactggggcgtggcactcgtcacggaaatggggacatcttgtcatttgaggatgccaaccgcgccatgcagactggtgtcaccgggatcatgattgcccgtggcgccctgctcaagccgtggctcttcacggagatcaaggagcagcggcactgggacatctcgtcgtccgagcgcctggacatcctgcgggacttcaccaactacggcctggagcactggggctcggacacgcagggcgtggagaagacccggcgctttctgctcgagtggctgtccttcctgtgccggtacgtgcccgtggggctgctggagcggctcccacagaggatcaacg

SEQ ID NO: 186 - DNA, 2637 bp, Homo sapiens
  CDS (200)..(2215)
tcgcagcagcgtactgacgtcacgcaggacgccactgccctgtcgccccgcctgtgcagcccaggacctaggcgcggtagctggggctggcttttgaggggcgcgggcagccttctgactgggtcggaggcctgcgggcccgaagcctctgtccctcctgttcttgtccggcgctgcttagcccctccgcgtagtcatcatggatctgattttaaaccgaatggattatctgcaggtgggagtaacatctcagaagactatgaagctaattcctgcctcaagacacagagctacacaaaaggtggttattggagatcatgatggggtagttatgtgctttggcatgaagaaaggagaagcagcagcagtgttcaagactttacccgggccgaagattgcaaggctggaactgggaggggttatcaacacacctcaggagaaaatttttattgctgcagcatctgagattagaggcttcacaaaaagaggaaaacagttcctctcctttgaaacaaacctcactgaaagcattaaagctatgcacatatctggctcagacctctttctcagtgcaagttacatctataaccattattgtgactgcaaagaccaacattattacctttctggggataaaatcaatgatgtgatctgccttccagtggaaagattatctcgtatcacacctgtattggcctgccaggacagagtgctcagagttttacagggatctgatgtgatgtatgcagttgaagttcctggaccccctactgtcttagcactacacaatggaaatggcggtgactctggagaagaccttttgtttgggacatcagacggaaaacttgcgcttatacagattactacatccaaaccagtacgcaagtgggaaattcaaaatgagaaaaagagaggaggtattttgtgtattgacagctttgacattgtgggtgatggggttaaagatttacttgttgggagagatgacggaatggtggaagtgtatagttttgataatgcaaatgaacctgttctacgatttgatcagatgttgtctgaaagcgtcacatctatccagggtggttgtgtaggaaaagacagctatgatgaaatcgtggtgtccacatattcaggctgggttacaggtctgacaacagagcccattcataaggaaagtggaccaggagaagaactaaaaattaatcaggagatgcagaataaaatttcttccttacggaatgagttggaacatttgcagtataaggtattgcaggaaagagagaattatcaacagtcttctcaatcaagcaaagcaaaatcagcagtaccttcctttggtataaatgataaatttacactaaataaagatgatgccagttacagccttatcttagaggtacagactgcaatagataatgtcttaatacagagtgatgttccaatagatttacttgatgtggataaaaattctgctgttgttagctttagcagctgtgattctgagtcaaacgacaacttccttcttgccacttatcggtgccaggcagatactacaaggctggaactcaagattcgctcaattgaaggccagtatggcacactacaagcatatgtgactccaagaattcaacccaaaacctgtcaggtccgccagtaccacatcaaacctctttcactccatcaaagaactcactttattgatcatgacagacccatgaatacactgaccctaacaggccagttcagttttgctgaagttcactcctgggtggttttttgtctgcctgaagttccagaaaaacctccagcaggagaatgtgtgacattttactttcagaacacctttctagatacacaacttgaaagtacctacagaaaaggagagggagtttttaaatctgacaacatttctactatctccatcctaaaagatgtgctttctaaagaagctacaaaaaggaaaattaacctcaacatatcatacgagataaatgaagtatcagtcaaacacactttaaagctaatccacccaaagctggagtaccagttgcttttggctaagaaagtgcagttaattgatgctttaaaagaattacagattcatgagggaaatacgaactttctgataccagaatatcactgtattctagaagaggcagatcacctacaggaagaatacaaaaagcaacctgcacatcttgaaagactctatggttagtggaccattctagaataccttgccatatttcttttcaactggctatttcccaaggatcatgtaagagaagctgggcagaaagataaaaagattacatcagtcatgattcatgaaccagtcatgaatcagttgacaacaaatttattgcacagaatatttctgtattttgtcaagctacttttaatatttaattcttttacttgataaaatgcaagtatattaagaaataagtatactgtgatgaattaatctatatatatgaacaaacctggtataaaatgaatgtaatctatgaacctttagagcttagactgtatttcacacaaataattgtcatgttttgttgctattgtgaattataaaaatgcagcatttaaaatttttaaggcaaaatttaataaaggatatacagtaaaaaa

SEQ ID NO: 187 - DNA, 1029 bp, Homo sapiens
  CDS (261)..(905)
acagtttgagaaccgtcggccgacccacgcgtccggcagtagatcgcgatctagaactagtccggacgcgtgggaaagacttcttttgagctaactttcttatactggtacctttctaatctcactacaatatgtaacattggtgttcgatctcaagtatttctgaatatattcccctatccacagaaatatactctgggggaaaaaaaatagaacaaattcttgccgtcctgaccattgaacaagagactaattagacaatggggctagaaaaacctcaaagtaaactggaaggaggcatgcatccccagctgataccttcggttattgctgtagttttcatcttacttctcggtgtctgttttattgcaagttgtttggtgactcatcacaacttttcacgctgtaagagaggcacaggagtgcacaagttagagcaccatgcaaagctcaaatgcatcaaagagaaatcagaactgaaaagtgctgaagggagcacctggaactgttgtcctattgactggagagccttccagtccaactgctattttcctcttactgacaacaagacgtgggctgagagtgaaaggaactgttcagggatgggggcccatctgatgaccatcagcacggaagctgagcagaactttattattcagtttctggatagacggctttcctatttccttggacttagagatgagaatgccaaaggtcagtggcgttgggtggaccagacgccatttaacccacgcagagtattctggcataagaatgaacccgacaactctcagggagaaaactgtgttgttcttgtttataaccaagataaatgggcctggaatgatgttccttgtaactttgaagcaagtaggatttgtaaaatacctggaacaacattgaactagaaactcagaaagtggtccttgtgatggaaagagaaaagaaaaccaattagaataaggcagaatgtacgtgcgtcattggaacacagaaaacatgctggttcatacagaaaaaaaaaaaaaa

SEQ ID NO: 188 - DNA, 368 bp, Homo sapiens
  CDS (22)..(234)
ttcttttagaactccattgatatgtgtagctatgtaagtagtatgtgtatgtgcgtgtgtatatatacgtatgtctgtacaggtatatatacatgcatatactacttgtatatacacacatgctgcttaatacatgtgtatagtcatgtatatatacacgtgtatatgtatattacatttatacacatacattttttatatgttaatagtgattctcagtggtggcattacaagtgatctttattttccttacatttaaaaaaattgagtgcatttttacaaataataaaatatgttttaaacaatcattaatacctttttagaaaaacaggatgaagttgtctattacgatccatgtgaaagtccag

SEQ ID NO: 189 - DNA, 1958 bp, Homo sapiens
  CDS (64)..(1821)
ggtgcccaccctggcagcatcccacctcctgagtcctctcggcacccagcaaggttgaagttcatgagttcgcccagcctcagtgacctgggcaagagagagccggccgtcgccgcggacgagcggggcacgcagcagcgccgggcctacgccaacgccacctggaacagcatccacaacggggtgatcgccgtcttccagcgcaaggggctgcccgaccaggagctcttcagcctcaacgagggcgtccggcagctgttgaagacagagctggggtccttcttcacggagtacctgcagaaccagctgctgacaaaaggcatggtgatccttcgggacaagattcgcttctatgaggagctgcagagagacaaggcggcggcggctgctgtgctgggtgcagtgaggaagaggccctcggtggtgcccatggctggccaggatcctgcgctgagcacgagtcacccgttctacgacgtggccagacatggcattctgcaggtggcaggggatgaccgctttggaagacgtgttgtcacgttcagctgctgccggatgccgccctcccacgagctggaccaccagcggctgctggagtatttgaagtacacactggaccaatacgttgagaacgattataccatcgtctatttccactacgggctgaacagccggaacaagccttccctgggctggctccagagcgcatacaaggagttcgataggaaagacggggatctcactatgtggcccaggctggtctcgaactccaagctcaagcgatcctcccacctcagcctcccaaagtactgggattacaggtacaagaagaacttgaaggccctctacgtggtgcaccccaccagcttcatcaaggtcctgtggaacatcttgaagcccctcatcagtcacaagtttgggaagaaagtcatctatttcaactacctgagtgagctccacgaacaccttaaatacgaccagctggtcatccctcccgaagttttgcggtacgatgagaagctccagagcctgcacgagggccggacgccgcctcccaccaagacaccaccgccgcggcccccgctgcccacacagcagtttggcgtcagtctgcaatacctcaaagacaaaaatcaaggcgaactcatcccccctgtgctgaggttcacagtgacgtacctgagagagaaaggcctgcgcaccgagggcctgttccggagatccgccagcgtgcagaccgtccgcgagatccagaggctctacaaccaagggaagcccgtgaactttgacgactacggggacattcacatccctgccgtgatcctgaagaccttcctgcgagagctgccccagccgcttctgaccttccaggcctacgagcagattcttgggatcacctgtgtggagagcagcctgcgtgtcactggctgccgccagatcttacggagcctcccagagcacaactacgtcgtcctccgctacctcatgggcttcctgcatgcggtgtcccgggagagcatcttcaacaaaatgaacagctctaacctggcctgtgtcttcgggctgaatttgatctggccatcccagggggtctcctccctgagtgcccttgtgcccctgaacatgttcactgaactgctgatcgagtactatgaaaagatcttcagcaccccggaggcacctggggagcacggcctggcaccatgggaacaggggagcagggcagcccctttgcaggaggctgtgccacggacacaagccacgggcctcaccaagcctaccctacctccgagtcccctgatggcagccagaagacgtctctagtgttgcgaacactctgtatgtttcgagctacctcccacacctgtctgtgcacttgtatgttttataaacttggcatctgtaaaaataaccagccattagatgaattcagaaccttctaatgaaaaaaaaaaaaa

SEQ ID NO: 190 - DNA, 1865 bp, Homo sapiens
  CDS (64)..(1728)
ggtgcccaccctggcagcatcccacctcctgagtcctctcggcacccagcaaggttgaagttcatgagttcgcccagcctcagtgacctgggcaagagagagccggccgtcgccgcggacgagcggggcacgcagcagcgccgggcctacgccaacgccacctggaacagcatccacaacggggtgatcgccgtcttccagcgcaaggggctgcccgaccaggagctcttcagcctcaacgagggcgtccggcagctgttgaagacagagctggggtccttcttcacggagtacctgcagaaccagctgctgacaaaaggcatggtgatccttcgggacaagattcgcttctatgaggagctgcagagagacaaggcggcggcggctgctgtgctgggtgcagtgaggaagaggccctcggtggtgcccatggctggccaggatcctgcgctgagcacgagtcacccgttctacgacgtggccagacatggcattctgcaggtggcaggggatgaccgctttggaagacgtgttgtcacgttcagctgctgccggatgccgccctcccacgagctggaccaccagcggctgctggagtatttgaagtacacactggaccaatacgttgagaacgattataccatcgtctatttccactacgggctgaacagccggaacaagccttccctgggctggctccagagcgcatacaaggagttcgataggaagtacaagaagaacttgaaggccctctacgtggtgcaccccaccagcttcatcaaggtcctgtggaacatcttgaagcccctcatcagtcacaagtttgggaagaaagtcatctatttcaactacctgagtgagctccacgaacaccttaaatacgaccagctggtcatccctcccgaagttttgcggtacgatgagaagctccagagcctgcacgagggccggacgccgcctcccaccaagacaccaccgccgcggcccccgctgcccacacagcagtttggcgtcagtctgcaatacctcaaagacaaaaatcaaggcgaactcatcccccctgtgctgaggttcacagtgacgtacctgagagagaaaggcctgcgcaccgagggcctgttccggagatccgccagcgtgcagaccgtccgcgagatccagaggctctacaaccaagggaagcccgtgaactttgacgactacggggacattcacatccctgccgtgatcctgaagaccttcctgcgagagctgccccagccgcttctgaccttccaggcctacgagcagattcttgggatcacctgtgtggagagcagcctgcgtgtcactggctgccgccagatcttacggagcctcccagagcacaactacgtcgtcctccgctacctcatgggcttcctgcatgcggtgtcccgggagagcatcttcaacaaaatgaacagctctaacctggcctgtgtcttcgggctgaatttgatctggccatcccagggggtctcctccctgagtgcccttgtgcccctgaacatgttcactgaactgctgatcgagtactatgaaaagatcttcagcaccccggaggcacctggggagcacggcctggcaccatgggaacaggggagcagggcagcccctttgcaggaggctgtgccacggacacaagccacgggcctcaccaagcctaccctacctccgagtcccctgatggcagccagaagacgtctctagtgttgcgaacactctgtatgtttcgagctacctcccacacctgtctgtgcacttgtatgttttataaacttggcatctgtaaaaataaccagccattagatgaattcagaaccttctaatgaaaaaaaaaaaaa

SEQ ID NO: 191 - DNA, 1092 bp, Homo sapiens
  CDS (556)..(972)
gaagttccaacatgctttatttgaggacgagcgctcacccgggatggagtaagaagtgggatgggagaagcgtagggttcaaattttctttgtgtctctgtgatccttaaagcatctcagcaagctgtagagatggtattaaggggagagaaaactttgagatgacaagaggaaacgttaataccattctcactccaatgaaacccatgaccactttttaaatgtcctacagagtcactgggtgagataagtaagatcactgtttcaatacagatggggaaagataataaataaagaagtcttggttttcttcatttgcagggaggattaccagggtagaaatgggtaaaaatcggtaaataactatttactactgtctctggtgttttctcataatcaagccacttaaatacctccctacttttccctcaactcccagaacaaagccaagactttgataccaatttcttcgtgcttttcctcaagcaggtaactaggagtatccctactccagccttgtgcccctagaactgggctggagctcagagacttaaaatgactcatggcagctgccttccccagctcagtgataaggtcgcccctgccaaacactggagaccaaagcccaggtccatcactcccatagtgactcctcccataagctctgcctcagctgtgaaaggcaagagggagaaggggagtgaggctcttgttcctcctcacctagtgggaagatatgcctcttcaaggtcccaccccagccagggaggagagggcaggcctcaggcagggtgtggacacagctggttgacactcagctcagctacagatcggctcagccacagttgggccggcctgaaccccaggtgcccaccagcagcaacttggcccccttgctctaccttctcaccattcgccagcagtgggtgcaggcagccatcatctttccacaaagatgttcagttggaggaatgagaggagccaccaaatgaaaaaggtacaggttgagcgtccttaacccaaagatccaaaatcaaaaatgctccataacccaaaacttttttttttttgagttgggttctcccagtggcg

SEQ ID NO: 192 - DNA, 620 bp, Homo sapiens
  CDS (27)..(389)
tgggagcagatctctgcagaataaaaatgaaaaagcatctgacgaccttcttggtgattttgtggctttatttttatagggggaatggcaaaaaccaagtggagcagagtcctcagtccctgatcatcctggagggaaagaactgcactcttcaatgcaattatacagtgagccccttcagcaacttaaggtggtataagcaagatactgggagaggtcctgtttccctgacaatcatgactttcagtgagaacacaaagtcgaacggaagatatacagcaactctggatgcagacacaaagcaaagctctctgcacatcacagcctcccagctcagcgattcagcctcctacatctgtgtggtgagcgcactgtgctccacaggcacttgaagccagtatgcaaacctgcacctggaggttatcaaggaggcataggagttagagtagaccgttattttttatgcagaatatgatttcactagtgaatatttatctctccgacatgatttgatttgagcttgagcctaaagttctacttaggctcaagtagaatacatgtcctcaagcgaggataaagacattctcactcaacacacaaagttaattgctacatctggc

SEQ ID NO: 193 - DNA, 350 bp, Homo sapiens
  CDS (131)..(304)
aggttcacaataaaggtgctaagaaagagaatgtaagacaggaaaataattaaatattcttaccgagtgtcttcaataggccgtgtttaagaggcgtcttacactccctgttgccagtggctggaacacaatggatcacacaggggcgatagacaccgaggatgaagtgggacctttagcccatcttgctccaagtcctcagagtgaagctgtggctcatgaattccaggaactctccttgcagtccagtcaaaacttaccccctctgaacgaaaggaaaaatgtgaacattcctccatgttattaaatgttcctctcagctgggcatgatggctcacacctgtaatccc

SEQ ID NO: 194 - DNA, 1363 bp, Homo sapiens
  CDS (685)..(948)
gcattatttaaaaaacctctaaaattaggaaaagaattcccacatgtggtttttaatatatctcatgctacttcgaaatataatctgcactagtctttgttaaagtttgagggagtcataaaataatgtccctctcctctcctgacctctgaaccacttgagacacagacagatggagattcaatattttaagtttactgctgaaaaaggctaggttagaggatgtactttaagtttatgccaacaatagccaccagatattgaacttagaattagacagacctgcttactaaggcatgggcagttctgcacaagcacaaatctccctttgcagaggcaaagaactttcactgcaaggttcacaatgtagctggcaagagaccacaacatcggttctctgcagttatgacaaatccacaaaagggaaaaaagaggctagcatgcccagttctatatcttaaactccctcctttcctggtgaagtgagagaaagagattagaattccttggtaaatggatagcctaagaagcactgtgagaggaagccatccttacccgccgctgccttctgaccaaagtagttcatatatagtgcacattagggcatgattcatgttacagtagctttagggccacacttcttcttccgaagtaaccatatttaattgcaagtgactaaggtaaatgactttagggataacctcctttatttcattttatttctgttttataatttatatatttcaatatcttattattggtaagaaaaacttaactttctcagtcctaaaattctttattatcaaatacatcagtttaataataatctctaaggaagaaaaaaacacatttaagatatccattgatttgaagataattattatggaactatggttcttatgtcaactcacaactcatttagatattaatacatgtatcatgaaatcatagctcagaattgctggtccagagtcactttagaatggctctgattcaaggaaattaaaagaaatgattgttaattttcttagtgctgggaaaggcagtgaaacaagcttttgaatcattatgtaattttcaaacaactaaaagggctatactgttcagttataatcttaaaaattctagctgagacagagcttttaaaaaatctttatagttttaccatacggcatcaattcaaaagattgtcatactgaaaccactgccataaaattttgtatgtaggccccagttgcagtagatctggctcctgtgagctataacttgcatggcttttcaatgtttatgtagtgtctgttaatatatttaagataaatactctataaccaaacagcctgttttctagagaatgatatatgat

SEQ ID NO: 195 - DNA, 806 bp, Homo sapiens
  CDS (52)..(660)
gcttgaaaatactttccaagatgaaaattcatcagggtgggtataattctgatgaaaacgcctgtgttcatcaacacagggtcagagcgctcaccgggtcgatgtgcaaatccaagccaggaagtcctgctccgggtggaaggtaaaaccttccctccagggaaccaggggctccggcgggcatcggaggcagcttcttggcctctgctgctgtgtcccccagtccccccagcccgcattaatgtcctctggaataagagcctgtggctgaagcagagggccttctgggagagctctccaaggtctggaaggagggtcccccagaaggagctccggggtagccccactgtggcccccctggactccaccagcttcatgcttctcagatgctacccaggggccggcccggggagaccagggcagatttctcccgcaccaggctgtggaggtttggagggctgcctgagcagacactgtgccattgctggggctggggaaagaatatctgagacgacgtttgggagcaatgctctttaccacgttcaccaaatcgtctggggcaggggttgtgagctgcagcagttgctggtgccttgtgggaaggtggggcagggaggaggctgcccgccacctctgcccccagtcacttcctgcttgacctgactcttcacatgtggctgcttaattcctgcccctctccccccagctgcttctcctttactaacacacctgctacattttacacatgtgttggtaagtgagaaacagaaacgaaaaataaattaaaatgcagaaaaaaaaaaaaa

SEQ ID NO: 196 - DNA, 1885 bp, Homo sapiens
  CDS (120)..(1061)
aggaaaactcagggcgaggtgagagaggacagaacctctaaccaggaagaggctgtccccgccaagctccggagaggcgcggaagcatgaccctcaggtggtaacagaaaacaatccagatggggtgcaggtgctgtaaaataatacaaagctatctctttgatccagttcaagtgccctctcctggctatgtcaatgaagtcaacagctgcaagctagatgaagacgacactgataaattaaaaggcaaatggagcagtgaagtcttggtgcagaaaaatgaccctcagaggcagggctcaaagaagactgagagcagcagcaggacagctgatccatgggagccctgctggcctcaccaagggccgctcccacagggggacgctggaggggaacaccatgcctgcggtgtcaacggcatcggccctgctgccactccacagcccactgggaattccagccccacccaggatgacaggggctcctgggccagtactgcaaatactgttcccccaactcaacccttcctggaaggagggggcaccaggaaacaggactgtgtgctgctggcctcagaagggacccaagtcatgagaaatggagactccagagctccttctgaggcagaaagttttgccttggaagtacaagaccatgtcttccagataccagccccagattaccttcagcattggggcccagctggagacaacgttgatcataatgaaaaggactgtgttttcaagaaccatactgaggatgaatccctagagggaattcagcccccagtgggggagcatggtttgaatacgcccttctctgtgaggagaagctgggattcattgaatgaggatgtggaaacagaagttctaagcatctgctttaatgagaagggtcctgttcatgccatgcctgtggttgactcaggaaacaggcaggaggatacccatggctccgatggagatggggatggggagattgtggacgaggatgcagcggtggcggaggcccttgcagctttagaagctgctactgcaggagaagatttggatgagactgattaggggaggggatttgcacagggaggtaagctggtgtcatgctgagcatgcagatgcatttgctccctggatgcatagcaggtgattctgccagcatgcaccagtgcagccttaccagttgtttacatccagcatctgttctgattgtcagcatctgtcccatgctgcttgtcacatatctggagtttcactctgtgtagatgagctgtcattcaggacactaggagaaaaatctgagtgggtcattgtgcccatatccacagaaaatgcagaagttgaacagcttgcttgacaaccctcaaacatctttgagcacctggtacagatgtttatgagaatactctaagatctcaacccttgatcccaaaggcacacaatcacagagcattccttttgactgtaaactgtttaccttgcttttgagagccaaacattgtacccaacctggaaaaagtaactaccccaattaaagtgcctcatgtgtccccagagcatggcttaacttcagggacaatcacccagggaactaataactaaccagttgttcaacagcgggttaagctcagcagttttcacagtagagcagaagtccccaggaaacaaagggttagtcattagctgagatgttgattttaaaacaccttgaccttaacttttttacattattacttttaaatctcctttgggattggggaggctggccaaaataagtcttaaaactgcttatgtcatatttggattttaagttcatgacattcggaacagcaaagccatatatgcaatgtttttatgccattaaatgtctgattccaattaaaataaaa

SEQ ID NO: 197 - DNA, 2897 bp, Homo sapiens
  CDS (226)..(1542)
aaggtccaatcccatgatcataattgggggcgcgtggagggatactctttagcggccgcgggatgcccctgcgctgaccgccaggggcaggtgcccgcccgcgtagacgcacccggcctgaccccgcgccaccatgtaaacggcgccagcaggcggacgctggcttctccgcctgggacccctccgccccgacccgggccccgcggccctcgatgaggacacaccatgctgaccggggtgaccgacggtatcttctgttgcctgctgggcacgccccccaacgccgtggggccactggagagcgtcgagtccagcgatggctacacctttgtagaggtcaagcccggccgcgtgctgcgggtgaagcatgcaggacccgccccagccgctgccccacctccaccatcatccgcatcctcggatgcagcccagggggacctctccggcttggtccgctgtcagcgccggatcaccgtgtaccgcaatgggcggttgctggtggaaaacctgggccgagcccctcgagccgacctcctacacgggcagaatggctctggggagccgccggccgccctggaggtggagctggcagatccggcgggcagcgatggccgcttggcccccggcagcgcaggcagcggcagcggcagtggcagtggtgggcggcggcggcgagccaggcgccccaagaggaccatccatattgactgtgagaagcgcatcactagctgcaaaggcgcccaggccgacgtggtgctctttttcatccatggtgtcggcggttccctggccatctggaaggagcagctggacttctttgtgcgcctaggctatgaggtggtggctcctgacctggccggccacggggccagctctgcgccccaggtggccgcagcctacaccttctatgcgctggctgaggacatgcgagcaatcttcaagcgctatgccaagaagcgaaatgtgctcattggccattcctacggtgtctctttctgcacattcctggcacatgagtacccagacctagtgcacaaggtgatcatgatcaatggcgggggccctacggcgctggagcccagcttctgctcaatcttcaacatgcccacctgcgtcctgcactgcttgtcgccctgcctggcctggagcttcctcaaggccggcttcgcccgccaaggagccaaggagaagcagctgttaaaggagggcaacgctttcaacgtgtcatccttcgtactccgggccatgatgagcggccagtactggcccgagggcgacgaggtctaccacgccgagctcaccgtgcccgtcctgcttgtccacggcatgcacgataagtttgtgccggtggaggaagaccagcgcatggccgagatcctgctcctggcattcctgaagctcatcgacgagggcagccacatggtgatgctggaatgccctgagacggtcaacacgctgctccacgaattcctgctctgggagcccgagccctcgcccaatggctctacctggatgccacatgacacggctgcctaccaggaatgacaatgaaagtatgacctgcttgtgtgcctgtgcgtgtggcaatctgctatgtgttgatgcaccatgcctgaaatgaccacggacgtgatggccctgaagccttgacagccaatggtgtcttgcaatgtctgcaaagaacccaacctttgtgggactgtggcacatggtttacagaataccatgtgattggtggactggtgtgaggccaaacgggtccactggggatgaacttgacaccacacagtggcatttgccattgtggtgacctgggtgacccgttagaggacaatacctggaaagaatggacgaccaacctatatgtctggggaacaagatttacaccgatgctttcaatcactgggacattcatcccgggatcacacctggctagtgtggaggacccaataatactaggcgtctggtatatcacttggggggagtgcccctgacacaaagcaccaggaatcggaacccccatatccacactcgcgcatactgacattggaaccaatattgcttacacaggaaaacggcacacacgataccaccatcaaaccaaattatcccacaacgacgacacaacaagcacacaagcccggacaccgaacaagtgacacacgggaacccagcacaaaaaaagcaacggacaagagcccaaaaccaggatgacaacaaaacaccagaaagcacaagagcaactcacacagggagcacgacacacagagcaagaaccaccaaaaaaagtggtcgaacacaccagacggaaggcgacacccacaaacccaacacggcagacactcaccgcagcaaaccaccacaacgcgcaaaacacaacaccacaaaacaacaaaggagcaggccagtggcaaagcacaaaaacaaaaacgaaacgaaaagaggcaaaagcggacacgaccaacaaacagagcgcaccagagagccacccacaaccacggaccccccgtggacccaccaccgtcaagagcccagagagcaaccaacacacaacaccaaaccagacaaccaacacgacgcgaccacacacgcacacacaaacaaaaaaggacgacagcacaacacaacaagagccgcacgaatcgacaagcgacgccaaccagagcgacgccccgcgccgacgccaccagaagaaagacgcagaagcacacgggtgacaagacaacacggcagcagcagcaagacccaccacccgcccacagacacacgcagacccagacgacccacgcccacaacagcacgacacgaaactcgggagcactgaccgcaccgcaccacgcggacgccacgaccgagcaccgaacaccaaacacgcacaaaagacgcaccgtcaccca

SEQ ID NO: 198 - DNA, 1600 bp, Homo sapiens
  CDS (13)..(1077)
ggcacgaggaggatgtcggtgaattacgcggcggggctgtcgccgtacgcggacaagggcaagtgcggcctcccggagatcttcgaccccccggaggagctggagcggaaggtgtgggaactggcgaggctggtctggcagtcttccagtgtggtgttccacacgggtgccggcatcagcactgcctctggcatccccgacttcaggggtccccacggagtctggaccatggaggagcgaggtctggcccccaagttcgacaccacctttgagagcgcgcggcccacgcagacccacatggcgctggtgcagctggagcgcgtgggcctcctccgcttcctggtcagccagaacgtggacgggctccatgtgcgctcaggcttccccagggacaaactggcagagctccacgggaacatgtttgtggaagaatgtgccaagtgtaagacgcagtacgtccgagacacagtcgtgggcaccatgggcctgaaggccacgggccggctctgcaccgtggctaaggcaagggggctgcgagcctgcaggggagagctgagggacaccatcctagactgggaggactccctgcccgaccgggacctggcactcgccgatgaggccagcaggaacgccgacctgtccatcacgctgggtacatcgctgcagatccggcccagcgggaacctgccgctggctaccaagcgccggggaggccgcctggtcatcgtcaacctgcagcccaccaagcacgaccgccatgctgacctccgcatccatggctacgttgacgaggtcatgacccggctcatggagcacctggggctggagatccccgcctgggacggcccccgtgtgctggagagggcgctgccacccctgccccgcccgcccacccccaagctggagcccaaggaggaatctcccacccggatcaacggctctatccccgccggccccaagcaggagccctgcgcccagcacaacggctcagagcccgccagccccaaacgggagcggcccaccagccctgccccccacagaccccccaaaagggtgaaggccaaggcggtccccagctgaccagggtgcttggggagggtggggctttttgtagaaactgtggattctttttctctcgtggtctcactttgttacttgtttctgtccccgggagcctcagggctctgagagctgtgctccaggccaggggttacacctgccctccgtggtccctccctgggctccaggggcctctggtgcggttccgggaagaagccacaccccagaggtgacagctgagcccctgccacaccccagcctctgacttgctgtgttgtccagaggtgaggctgggccctccctggtctccagcttaaacaggagtgaactccctctgtccccagggcctcccttctgggccccctacagcccaccctacccctcctccatgggccctgcaggaggggagacccaccttgaagtgggggatcagtagaggcttgcactgcctttggggctggagggagacgtgggtccaccaggcttctggaaaagtcctcaatgcaataaaaacaatttctttcttgcaaaaaaaaaaaaa

SEQ ID NO: 199 - DNA, 836 bp, Homo sapiens
  CDS (24)..(827)
cgaagcactgtgtttagatcaagatgtctggtaaagcaaatgcttccaagaaaaacgctcaacagttaaaaagaaatccaaagagaaaaaaggataatgaggaagttgtgttgtcagagaataaggttagaaacacagtgaaaaaaaataaaaatcatctgaaagatctgtcttctgaaggacaaacaaagcacactaacctaaaacacggaaagacagcagccagcaagagaaaaacctggcaacctctgtcaaagagtaccagagaccatttgcaaactatgatggaatcagtaataatgacaattttgagtaacagtattaaagaaaaagaagaaatacaataccatctcaacttcctgaagaaaagattgctacaacagtgtgaaactctgaaagtccctcccaaaaagatggaagatttaactaatgtatcaagtctactgaatatggaaagggcacgagacaaagctaatgaagaaggtctggcattactacaggaagaaatagataaaatggtagagaccacagagttaatgactgggaatattcagagcctaaagaacaaaattcagattctggcaagtgaggtggaagaagaagaggagagagtaaaacagatgcatcaaataaatagtagtggagtactctctcttccggaactttctcagaaaactctcaaagcacccacacttcagaaagaaattttggcgctaattccaaaccagaatgctcttctaaaggacttggatattcttcataattcatcacagatgaagagcatgtcaaccttcattgaagaagcctataagaaactggatgcatcttaaagagtg

SEQ ID NO: 200 - DNA, 2162 bp, Homo sapiens
  CDS (61)..(2016)
tctccgcgtacaggaggcggcggcggctttcagtctccggcccccgccggcgagcgcacgatgcactgcctgggcgccgagtacctggtttctgcagaaggagcccctaggcaaagggagtggcgaccccagatttataggaaatgcacagatacggcatggttattcctgttctttctcttttggactggtttggtgtttatcatgggctactcggtggtggctggagccgcgggaagactcctctttggctatgacagctttggcaacatgtgtggcaagaagaactcccccgtggaaggggcccctctttcagggcaggacatgaccctaaaaaaacacgtgttctttatgaattcctgcaacctggaagtcaaaggtacgcagctcaaccgcatggccctctgtgtatccaactgccctgaagagcagcttgactccctggaagaggtccagttctttgcaaacaccagtgggtccttcctgtgtgtttatagtttgaattccttcaactatacccacagtccaaaagcagactcactgtgtcccaggctaccagttcctccaagcaagtcatttcccttatttaaccgatgtgtccctcaaacacctgagtgctactccctatttgcatctgttttgataaatgatgttgacaccctccaccgaattctaagtggaatcatgtcgggaagagatacaatccttggcctgtgtatcctcgcattagccttgtctttggccatgatgtttaccttcagattcatcaccacccttctggttcacattttcatttcattggttattttgggattgttgtttgtctgcggtgttttatggtggctgtattatgactataccaacgacctcagcatagaattggacacagaaagggaaaatatgaagtgcgtgctggggtttgctatcgtatccacaggcatcacggcagtgctgctcgtcttgatttttgttctcagaaagagaataaaattgacagttgagcttttccaaatcacaaataaagccatcagcagtgctcccttcctgctgttccagccactgtggacatttgccatcctcattttcttctgggtcctctgggtggctgtgctgctgagcctgggaactgcaggagctgcccaggttatggaaggcggccaagtggaatataagcccctttcgggcattcggtacatgtggtcgtaccatttaattggcctcatctggactagtgaattcatccttgcgtgccagcaaatgactatagctggggcagtggttacttgttatttcaacagaagtaaaaatgatcctcctgatcatcccatcctttcgtctctctccattctcttcttctaccatcaaggaaccattgtgaaagggtcatttttaatctctgtggtgaggattccgagaatcattgtcatgtacatgcaaaacgcactgaaagaacagcatggtgcattgtccaggtacctgttccgatgctgctactgctgtttctggtgtcttgacaaatacctgctccatctcaaccagaatgcatatactacaactgctattaatgggacagatttctgtacatcagcaaaagatgcattcaaaatcttgtccaagaactcaagtcactttacatctattaactgctttggagacttcataatttttctaggaaaggtgttagtggtgtgtttcactgtttttggaggactcatggcttttaactacaatcgggcattccaggtgtgggcagtccctctgttattggtagctttttttgcctacttagtagcccatagttttttatctgtgtttgaaactgtgctggatgcacttttcctgtgttttgctgttgatctggaaacaaatgatggatcgtcagaaaagccctactttatggatcaagaatttctgagtttcgtaaaaaggagcaacaaattaaacaatgcaagggcacagcaggacaagcactcattaaggaatgaggagggaacagaactccaggccattgtgagatagatacccatttaggtatctgtacctggaaaacatttccttctaagagccatttacagaatagaagatgagaccactagagaaaagttagtgaatttttttttaaaagacctaataaaccctattcttcctcaaaaaaaaaaaaa

SEQ ID NO: 201 - DNA, 873 bp, Homo sapiens
  CDS (2)..(790)
catggcattcctttggcttgtgtcctgctttgcccttgtgggcgccacctttggctgtggggtccctgccatccaacccgtgctgaccggtctgtccaggatcgtcaacggagaggatgctatccctggctcctggccctggcaggtgtccctgcaggacagaactggcttccatttctgcgggggctccctcatcagcgaaaactgggtggtcactgctgcccactgcggggtcaagacaaccgatgtggtggtagctggagagtttgatcagggctccgatgaagagaatgtccaggtcctgaaaatcgctcaggtttttaagaaccccaagttcaactccttcaccgtgcgtaatgacatcaccctgctgaagctggccactcctgcccagttctctgagactgtgtctgccgtgtgtctgcccactgttgacgatgacttccctgctgggacactgtgtgccaccactggctggggcaagaccaaatacaatgccctcaagacccctgacaagctgcagcaggctgccctgcccatcgtgtccgaggctaagtgcaaggagtcctggggttccaagatcaccgatgtgatgatctgcgcagggcccagtggcgtctcttcctgcatgggtgactctggtggccccctcgtctgccagaaggacggagtctggaccctggcaggcattgtgtcctggggcagtggtttctgctccacttccacccctgccgtgtatgcccgagtcactgccctcatgccctgggttcaggagatcttggaagccaactaagtacacggtcctttcctcttccctcttcctccccctccgtgcatctacaataaaaatcatctaattagaaaaaaaaaaaa

SEQ ID NO: 202 - DNA, 1072 bp, Homo sapiens
  CDS (182)..(973)
gcagtcatgagtcgcttcaagtttatcgatattggtatcaacttgactgaccctatgttcagaggaatttataggggggttcaaaagcatcaagatgacttacaggatgtaatagggagagctgtcgagattggtgttaaaaagtttatgattacaggtggaaatctacaagacagtaaagatgcactgcatttggcacaaacaaatggtatcctcatatttcttttaccaaaaaaaaaatgaattaagtaattttgaagaagtctttctgaaaactgcttcaggtatgtttttcagtacagttggatgtcatcctacaagatgtggtgaatttgaaaagaataaccctgatctttacttaaaggagttgctaaatcttgctgaaaacaataaagggaaagttgtggcagtaggagaatgtggacttgattttgaccgactgcacttttgtcccaaagatactcaactcaaatactgtgaaaaacagtttgaactgtcagaacaaacaaaattaccaatgtttcttcattgtcgaaactcacatgctgaatttttggacataattaaaagaaatagagatcggtgtgtagggggagtggtgcattcatttgatggtaccaaggaagcagcagctgctttgattgacttggatctttatataggatttaatggttgctcactgaaaactgaagctaatttggaagttttgaagtcaattcctagtgaaaaattaatgattgagacagatgcaccttggtgtggagtcaaaagtacacatgctggatcaaaatatataagaactgcatttcctaccaaaaagaagtgggaaagtgggcactgcttaaaagacagaaatgaaccctgccatataattcaaatattggagataatgtcagcagtgagagatgaggatccactggaattagccaatacactatataacaatactattaaagtattttttcctggaatataattggtatatgtcttccactttccatcatgtatgtaaaatttcatagtaaaacttcctgatagtttcaataaagaaattatctgcaaaaaaaaaaaa

SEQ ID NO: 203 - DNA, 642 bp, Homo sapiens
  CDS (59)..(466)
cgactacagaatgaactgttggctttgcaaaatgacccacctcctggaatgaccttaaatgagaagagtgttcaaaattcaattacacacgtggattgtagacatggaaggtgcaccaggtaccttatatgaaggggaaaaatttcaacttctatttaaatttagtagtcgatatccttttgactcttctcaggtcatgtttactggtgaaaatattcctgttcatcctcatgtttatagcaatggtcatatctgtttatccattctaacagaagactggtccccagcgctctcagtccaatcagtttgtcttagcattattagcatgctttccagctgcaaggaaaagagacgaccaccggataattctttttatgtgcgaacatgtaacaagaatccaaagaaaacaaaatggtggtatcatgggaaatttgaacacagagacatacacaaagggaagaagatgtgaagatacaggaagaatgtgaagatggtcatctataaaccaaagagaggcttgggacagaccctaccctctcagtcttcacaggacaacaaccctgcccgcaccttgatcttggacttctagcttccagagctgtgagaaaataaatgtctattgtttaagccaaaaaaaaaaaa

SEQ ID NO: 204 - DNA, 815 bp, Homo sapiens
  CDS (11)..(790)
tgccatcgctatgtctctgcaaaagacccctccgacccgagtgttcgtggaactggttccctgggctgaccggagccgggagaacaacctggcctcagggagagagacgctaccgggcttacgccaccccctctcctcaacacaagcccaaactgctacccgcgaggtgcaagtaagcggcacctcagaagtgtctgcgggccctgaccgggcgcaggtggtggtgcgagtgagcagcaccaaggaggcggcagccgaggccaaaaagagcgtttgtcgccgtctagattacatcacgcagagcctccagcagcagggcgtgcaggcagaaaatataactgtgacaaaggattttaggagagtggaaaatgcttatcacatggaagcagaggtctgcattacatttactgaatttggaaaaatgcaaaatatttgtaactttcttgttgaaaagctagatagctctgttgtcatcagcccaccccagttctatcatactccaggttctgttgagaatcttcgacggcaagcctgtcttgttgctgttgagaatgcgtggcgcaaagctcaagaagtctgtaaccttgttggccaaaccttaggaaaacctttactaatcaaagaagaagaaacaaaagaatgggaaggccaaatagatgatcaccagtcatccagactctcaagttcattaactgtacaacaaaaaatcaaaagtgcaacaatacatgctgcttcaaaagtatttataacttttgaggtaaagggaaaagagaagagaaaaaagcacctttgaaattccaaacaaaaaaaaaaaa

SEQ ID NO: 205 - DNA, 883 bp, Homo sapiens
  CDS (121)..(660)
cgacccacgcgtccgggctggccggtcgcagggtagggggtccgtggacctcccggcctgtagggggcgtcgggcgcagcggaagggcctgctccggagcctggccagggctgcgcagtcatgatcaccgagaccgcggcggagcctacggtccctgcagtgcctgctgctgaggaggccaccgaagctcggggacgcgaggagccggcgtggccctggaaagacgccccgatccggacgctggtgcagcgcatccaccagctgcaggctgagcgcgcgcagggcttccgccgactggaggagtggttggcgccggtgcagggcctgagagcctgggggcgcggcctcagggtccccacatgccgcagaggccaccgccagtacctgcgcagcggccctgactacgacttcgcgcgctaccggagcacagtgcacggggttgacccaggccttcgccgccgcctcgcgggaggtgctggcggtggaagcagagctgggcgggcctcgcaggcagccgctgctcgccggccacgtgcgcagcctgcaggagctggagcagacgcggctgggcacggtggccctgctgcagttgatggagacgccagagctggcggggcaggaggacgctgtacggatgcagcagctgaaaatgaaggtaattaaaaccatggaggcgatcagcgaggttctccaggaccttaggtttgatgcggaatctgccgagtgatggcggctccccagggatgcgccgagggagatgggaaacggggcggatggcgcccagcccagccctaactgccagctggctggggtcgcgccccactgcgctgctgaccttcctgcagttccagacacctcccacaataaagagctcctcctctgt

SEQ ID NO: 206 - DNA, 817 bp, Homo sapiens
  CDS (121)..(594)
cgacccacgcgtccgggctggccggtcgcagggtagggggtccgtggacctcccggcctgtagggggcgtcgggcgcagcggaagggcctgctccggagcctggccagggctgcgcagtcatgatcaccgagaccgcggcggagcctacggtccctgcagtgcctgctgctgaggaggccaccgaagctcggggacgcgaggagccggcgtggccctggaaagacgccccgatccggacgctggtgcagcgcatccaccagctgcaggctgagcgcgcgcagggcttccgccgactggaggaaggccaccgccagtacctgcgcagcggccctgactacgacttcgcgcgctaccggagcacagtgcacggggttgacccaggccttcgccgccgcctcgcgggaggtgctggcggtggaagcagagctgggcgggcctcgcaggcagccgctgctcgccggccacgtgcgcagcctgcaggagctggagcagacgcggctgggcacggtggccctgctgcagttgatggagacgccagagctggcggggcaggaggacgctgtacggatgcagcagctgaaaatgaaggtaattaaaaccatggaggcgatcagcgaggttctccaggaccttaggtttgatgcggaatctgccgagtgatggcggctccccagggatgcgccgagggagatgggaaacggggcggatggcgcccagcccagccctaactgccagctggctggggtcgcgccccactgcgctgctgaccttcctgcagttccagacacctcccacaataaagagctcctcctctgt

SEQ ID NO: 207 - DNA, 2818 bp, Homo sapiens
  CDS (41)..(1666)
  misc_feature (1)...(2818): n = a,t,c or g
gtgggcggacgcgtgggggaaatttagaaacagaggacttatgcagaagcatttgaagaatcatgttaagaagatacagaggcagcaaattgctgcagctcaacaggatgatcaggaagtcactgctttggaagaaataaattgttctagttcttccatttcatttgaaaatgggaattctgatagtaaggatttggaagtggagacacttactgcttctagtgaaggaaacaaagaagtcatccctgagcatgtggctgaattcattgaaattcccataagtgtaccagaagatgttattgaaaatgttattgaaaatggcagtcctaataattctttaaataatgttttcaagcctttaactgaatgtggggatgattatgaggaggaagaggatgaagaaggtgattatgaagaagatgattatgacctgaatcaagaaacttcagtaattcataaaatcaatggaactgtgtgccatccaaaagacatatatgccacagatcaagaaggaaactttaagtgtcctgctcttggttgtgtccggatatttaaaagaattgggtttctaaataaacatgcaatgaccgtacatccaaccgatttaaatgtgcgacaaacagtaatgaagtggagcaaaggaaaatgcaaattttgtcaaaggcaatttgaagattctcaacattttatagaccaacttaatagacatagctatccaaatgtgtatttttgtttgcattttaattgcaacgagtcgtttaagctgccgttccagcttgcccagcacacaaaaagtcacaggacatttcaggctcagtgtagttttccagaatgccatgagctttttgaagatcttcctctgctgtatgaacatgaagctcaacactatttaagtaaaacaccagagtcatctgcacaaccaagtgaaacaattctttgggatgttcagacagactcaaatcctaatcaggaaaaagactcatctagtaatgagaaacaaactattagtctgccagtttctactagcaaatcaaggaaagagtctacagaaccaaagacatgtatagaaagtatggaaaagaaaacagacagtttagttcagaatggaaacgaacgttctgatgacactgtttcaaatataagcttgatagaccaaaagatgcctgacatagagccaaattctgaaaataattgtagtagtagtgatatagtcaatggacacagtgaaatagagcaaacacctttagtttcatcagatcctgctttgaaaattgatacaaacagaatcaggacagaaaatggttccattttgcccagtgttgtaccacaagaacacaacaccttgccagtatctcaggcaccttccaaaccaaatctgacaagtgaacatacttcatatggcttaattttaacaaaaccatacgtcagaccattgcctcccagttaccttgatgaacggtatcttagtatgccaaaacgcagaaaatttctgactgatagagtagatgcctgttctgatcaagataacgtgtataaaaaatcagtgaaaagattaagatgtggcaaatgcctgaccacctactgtaatgcagaagcacttgaggctcatcttgcacaaaagaaatgtcagacactctttggatttgattcagatgatgaaagtgcctgatgaaaatggttcagaaagatctgtcaatcaagcagtagtgtgaaaaaagcactataagaaaatgcatcatcagtttgctatttccctgatggccttaattttagagtggtcttggattactaaagataaagacaaagcacattttctagaatgaactcacagagatgtgctggcttagactccaaaaggattataaaactcccaaagtaccagttttccagaaaaccacattttacagtttatgatgattaatagcagcagcatgttcagtttcgcttatatgagaaacatgtttaggcaactagtcagaaaaccagctatggccttacagaaagggaaaagtttaacccattattaaaaagtgtgtgtgggaggggggctggtttacaatattaaaccatttaaagtattttattctacaaatggggtttgttttcttgtcatgcataatcagattatgtcccctcccttctggttaaacatggtttaaggaaccgctgctgtttggtttgtgattgatttagaaacttatacattaacttaccacagtgctatcaattaaagattgtaacaggtttccagatgattaattaggtcaaagttcaatgaatggcacgccagcattgaaaattaaaaaacaaaacaaaaaaaaaaccacagtgctttgctaataagctcttgatagaacctcccactaaccacttttgtggtacaaattagttaacatttaaagggcagcagtgtcaataaaatagaaaaaaaccgatcagtactctggggagagatgaaaggaatctaagactttacaggctttgtagttgaaggaaaacactgaattgcaaattattcaatgtgaataatggtaaaagcacactgggatacttctgtttgtgtatatgttgggacattgcttgatgattcatagtaaggtcctttagacattaatgtgagttatctaagtacagtcctattaaaataactggctcaaaaaatcagctaagaatcaggttgagaaatcattcattttattctattaggagaggtaattccaaaagaagccatactattcctgtttttttaattcattagtgatgacttggnctgaacagtaatttttatatgtaaaaggaagtatttacacaaaacatt

SEQ ID NO: 208 - DNA, 1243 bp, Homo sapiens
  CDS (159)..(839)
tctgggagagaggagtgtcagacagctgttgtcaacaggcacctggccagagtgaaaaggaggggcagattccatccaagtcccagcggcgccagctgacactctctgccaatgcccaggtgctgagcgacagtgtcccaccggtccctgtgcccagaatggcctgcaccaagaccctgcaacagtcccagcccatctccgcaggagccaccacaaccaccaccgctgtggcccctgctgggggtcattctggctccacagaatgtgacctggagtgtctggtgtgccgggagccctacagctgtccccggttgcccaagctgctggcctgccagcatgccttctgcgccatctgcctgaagctcctgctgtgcgtgcaggacaacacctggtccatcacctgcccgctgtgccgcaaggtcaccgccgtccccgggggcctcatctgcagcctgcgcgaccatgaggcggtggtggggcagctggcccagccatgcacagaggtatcgctctgtcctcaggggctggtggatcctgctgacttggcagcaggacaccccagcttggtgggagaggatggacaggatgaagtaagtgcaaaccacgtggcagcccggcgcctggccgcgcacctactcctgctggccttgctcattatcctcatcgggcccttcatctacccgggtgtcttacgatgggtgctcaccttcatcatcgccctggccctgctgatgtccaccctcttctgctgtctccccagcacccggggcagctgctggccctcctccaggactctcttctgcagagagcagaaacacagccacatctcttccattgcctgagtgccctctgatgaggctatccctgcagccctttctgcccttgggcccccggacttccacaatgaacagggtaaggggttacggactaagactggctcctttgggaaatcacatgccagcgggacttgcaagccacaaccgagatggccagcctgggtcaagaattacacgcttggatgacaggcttgcacttgcccttgggatagcatagctaaaactgttggtggctaggggagcagacacaaactacttgaacatgacaagatgggggaagctcctgttcctcttattccaatgttcttggtttttctttatataacttgatgaaagtattgcagtattgatgccattgtagaatagaactggaattccattctttttgcaatttaaaaaaaaaaaaa

SEQ ID NO: 209 - DNA, 2145 bp, Homo sapiens
  CDS (200)..(1543)
taagcttgcggccgcagcttctccacattttcgttaacgccattctcaagcaagcgcatcaatatatttagttccggcctctttgcacgtcatttccggcaccggcatggccgggtgagctgcaggctaccttatttaagaccgggaatttagtcagcctggtgagccgactctgaggagatggagtatcgctgaggtgatgagagagaatgtggttgttagcaacatggagagagaaagtgggaagcccgtggctgttgtcgcagttgtgactgagccttggtttacccagcgatacagagaatatctccagaggcagaaactctttgatacacagcaccgtgtggaaaagatgccggatggctcggtggcgctaccggtgctgggagagacgcttccagagcagcacctgcaggagctgaggaatcgtgttgccccaggcagtccctgtatgctcacgcagctcccggatcctgttccttcgaagagggcccagggttgttcacctgcccaaaaattgtgtcttgaggtgagtcgctgggtggagggtcggggagtcaagtggtcagccgagttggaggctgatttgccccgatcatggcaacggcatggtaatctcttgttgctgagtgaagactgtttccaagccaagcagtggaaaaatctgggaccggaactctgggagaccgttgccttggcacttggcgtccagcgtttggcaaaacgagggcgggtatcaccggatggtactcgaactccagcagtgacactgctgctgggtgaccatggctgggtagagcatgtggataatggtatccgttataagtttgacgtgacccagtgtatgttctcctttggaaacatcactgagaagcttcgagtggcatcgttgtcctgtgctggagaagtgctggtggatctctatgcagggattggttattttacattgcctttcctagttcatgctggtgctgccttcgtccatgcttgtgagtggaatccccatgctgtagttgctctgagaaataaccttgagatcaatggagtagcagatcggtgccaaatacactttggagataacagaaaactgaagctctcaaatattgcagatagggtgatcctggggctgattcccagctctgaagaaggctggcccattgcctgccaagtgttaaggcaggatgctggaggcattttgcatatccaccaaaatgtggaatctttcccagggaagaatcttcaggctcttggagtcagcaaagtagagaaagagcattggctgtatcctcagcaaattaccaccaaccaatggaaaaatggagctaccagggattctaggggaaaaatgctgtcaccagccaccaagccagagtggcaaaggtgggcagaatctgcagaaactcgaatcgccactcttcttcagcaggtgcatgggaaaccatggaagacacaaattctgcacatccaaccagtgaaatcctatgctccccatgtggatcacatagtcctggatctggaatgctgcccctgtccttcagttggctagaggaggtagatcctgggacacatgggatccacgtgcgagtggcccttaaatgtatcagttcagtccaggttgtcatcccttttgtcccctggtgatcagtttttttcatattttatagccctgaaagcaggctctagatcaattcaaattatttcatttgtctttcattgataacagaaaatgaaatacctgtttgggagaagcagcatggcccattgaaatgaggctcatctgtgcaattatgaattccaaattctgacctcagttctggaattgaagtttcagtatgttttggcctcgggtttcgttatttgcaaaatgagagtttctttgaactgtctcacgtgactattaagcaactatacacaggacatcggttattttagagtgaaagacacagtgctttttccaaattgctctggctaccatatagaaaattgactgaaggagggccaagatggaaacagagagaccagtgaggaggcttctgtggttgtccaggtctgaggtgatggtaacttggactcggatggtggtaatgggaggtagattgatatgataaataaaattgacagaccaagcaatggaaaaaaaaaaaa

SEQ ID NO: 210 - DNA, 2293 bp, Homo sapiens
  CDS (176)..(2191)
catctcccccaacctgggggtcgtgttcttcaacgcctgcgaggccgcgtcgcggctggcgcgcggcgaggatgaggcggagctggcgctgagcctcctggcgcagctgggcatcacgcctctgccactcagccgcggccccgtgccagccaaacccaccgtgctcttcgagaagatgggcgtgggccggctggacatgtatgtgctgcacccgccctccgccggcgccgagcgcacgctggcctctgtgtgcgccctgctggtgtggcaccccgccggccccggcgagaaggtggtgcgcgtgctgttccccggttgcaccccgcccgcctgcctcctggacggcctggtccgcctgcagcacttgaggttcctgcgagagcccgtggtgacgccccaggacctggaggggccggggcgagccgagagcaaagagagcgtgggctcccgggacagctcgaagagagagggcctcctggccacccaccctagacctggccaggagcgccctggggtggcccgcaaggagccagcacgggctgaggccccacgcaagactgagaaagaagccaagaccccccgggagttgaagaaagaccccaaaccgagtgtctcccggacccagccgcgggaggtgcgccgggcagcctcttctgtgcccaacctcaagaagacgaatgcccaggcggcacccaagccccgcaaagcgcccagcacgtcccactctggcttcccgccggtggcaaatggaccccgcagcccgcccagcctccgatgtggagaagccagcccccccagtgcagcctgcggctctccggcctcccagctggtggccacgcccagcctggagctggggccgatcccagccggggaggagaaggcactggagctgcctttggccgccagctcaatcccaaggccacgcacaccctcccctgagtcccaccggagccccgcagagggcagcgagcggctgtcgctgagcccactgcggggcggggaggccgggccagacgcctcacccacagtgaccacacccacggtgaccacgccctcactacccgcagaggtgggctccccgcactcgaccgaggtggacgagtccctgtcggtgtcctttgagcaggtgctgccgccatccgcccccaccagtgaggctgggctgagcctcccgctgcgtggcccccgggcgcggcgctcggcttccccacacgatgtggacctgtgcctggtgtcaccctgtgaatttgagcatcgcaaggcggtgccaatggcaccggcacctgcgtcccccggcagctcgaatgacagcagtgcccggtcacaggaacgggcaggtgggctgggggccgaggagacgccacccacatcggtcagcgagtccctgcccaccctgtctgactcggatcccgtgcccctggcccccggtgcggcagactcagacgaagacacagagggctttggagtccctcgccacgaccctttgcctgaccccctcaaggtccccccaccactgcctgacccatccagcatctgcatggtggaccccgagatgctgccccccaagacagcacggcaaacggagaacgtcagccgcacccggaagcccctggcccgccccaactcacgcgctgccgcccccaaagccactccagtggctgctgccaaaaccaaggggcttgctggtggggaccgtgccagccgaccactcagtgcccggagtgagcccagtgagaagggaggccgggcacccctgtccagaaagtcctcaacccccaagactgccactcgaggcccgtcggggtcagccagcagccggcccggggtgtcagccaccccacccaagtccccggtctacctggacctggcctacctgcccagcgggagcagcgcccacctggtggatgaggagttcttccagcgcgtgcgcgcgctctgctacgtcatcagtggccaggaccagcgcaaggaggaaggcatgcgggccgtcctggacgcgctactggccagcaagcagcattgggaccgtgacctgcaggtgaccctgatccccactttcgactcggtggccatgcatacgtggtacgcagagacgcacgcccggcaccaggcgctgggcatcacggtgttgggcagcaacagcatggtgtccatgcaggatgacgccttcccggcctgcaaggtggagttctagccccatcgccgacacgccccccactcagcccagcccgcctgtccctagattcagccacatcagaaataaactgtgactacacttgaaaaaaaaaaaaaa

SEQ ID NO: 211 - DNA, 3068 bp, Homo sapiens
  CDS (193)..(3015)
cgggcgtccgcggtggctgcagtcccgtcggtctccctgctgtccggcgcgagctcttcgagtcttgcttgggatgtttcagcagcccctgagaaggaagaggaggaagctgagggcccgctgagggcgcaggacctgagggagtcctacatccagctcgtccagggtgtgcaggagtggcaggatggttgcatgtaccagggggagtttgggttgaacatgaagcttggatatggcaaattctcttggcccacaggcgagtcataccatgggcagttttaccgggaccactgccatggcctgggtacctacatgtggccagatggctccagtttcacgggcacattttacctcagccaccgagaaggctacggcaccatgtacatgaagacacggcttttccaggggctatacaaagcggaccagcggtttgggccaggtgtcgagacctaccccgatggcagccaggacgtggggctgtggttccgagagcagctcatcaagctgtgcacccagatccccagtggcttctccctcctcagataccctgagttctccagcttcatcacccacagccctgccaggatcagcctctcagaagaggagaaaacggagtggggactgcaggagggacaggatccctttttctatgactataagcggtttcttctgaatgacaacctaacgctgcctccagaaatgtatgtctactcgaccaacagtgaccacctgcccatgacaagctctttccgcaaagagctggacgcccgcatcttcctcaatgaaattcctccgttcgttgaggatggagaaccatggttcataatcaatgagacccctttgttggtcaaaatccagaagcaaacttacaagttcaggaacaagccagctcacaccagctggaacatgggcgccatcctggaggggaagcgcagtggctttgcaccctgtgggcccaaagagcaactttccatggagatgatcctaaaggctgaggaagggaaccacgaatggatttgtaggatcctgaaggacaactttgctagtgctgacgtggcggacgcaaagggctacactgtgcttgctgcggctgctactcactgccacaacgacattgtcaaccttctcctggactgtggggccgacgtgaacaagtgctcagatgagggtctcacggcactcagcatgtgtttcctcctccactaccccgcccagtccttcaagcccaatgttgctgaacggaccatacctgagccccaggaacctccaaaattcccagttgttccaatcctttcatcatcatttatggacacaaacctggagtctctgtactatgaggtgaacgtgccttcccagggtagctatgagctgaggccaccgccagcaccactgctcctgccacgcgtctcaggcagccacgagggcggccacttccaggacaccgggcagtgtggggggtccatggaccacaggagcagctctctgaagggggactccccgttggtgaagggcagccttggccatgtggaaagcgggcttgaggacgtgttgggaaacacagaccggggcagtctgtgcagtgctgagacgaaatttgagtccaacgtgtgtgtgtgcgacttctccatcgagctctcgcaggccatgctggagagaagcgcccagtcccacagcttgctgaagatggcctcgccctcaccgtgcaccagcagcttcgacaaagggaccatgcggaggatggcgctgtccatgatcgagcggaggaagcgctggcggaccatcaagctgctgctgcgccggggcgcggaccccaacctgtgctgcgtgcccatgcaggtcctgttccttgctgtgaaggccggggacgtggatggggtgaggctgctgctggagcacggggcgaggaccgacatctgctttccgccgcagctgagcaccctgacaccactccacatcgctgccgcccttcctggggaggagggggtacagattgtggagctgctgttgcatgccatcaccgatgtggacgccaaggcatccgacgaggacgacacttacaagcccggcaagctggacctgctgccctcaagtctgaagctcagcaatgagccaggccctccccaagcctactacagcacggacacagccctcccggaggaggggggcaggacggctctgcacatggcctgcgagcgggaggatgacaacaagtgtgccagggacatagtccggctccttctatcccacggagcaaatcctaacctgctgtggagtggccactccccgctctccctgtccattgccagtgggaatgagctggttgtgaaggagctcctgacccagggagctgaccccaacctgcccctgaccaaaggcttgggcagtgccctgtgtgttgcctgtgacctgacctacgagcaccagaggaacatggacagcaagctggccctgattgaccgactcatcagtcacggggccgacatcctgaagcctgtaatgctcaggcagggagaaaaggaggcagtgggcacagccgtggactatggctacttcagattcttccaggaccggaggattgcccgctgccccttccacacgctgatgccagcagagcgcgagacgttcctggcgcggaagcggctcctggagtacatgggcttgcagctacggcaggctgtctttgccaaggagagccagtgggaccccacgtggctgtacctgtgcaagagagcggagctgatccccagccacaggatgaagaagaagggccccagcctgcccaggggcctggatgtgaaggagcaggggcaaattcccttcttcaagttctgctaccagtgtggccgctccatcggggtccgcctcttgccctgccctcgctgctacgggatcctgacctgcagcaagtactgcaagaccaaggcctggaccgagttccacaagaaggactgcggggacctggtggccatcgtgacacaactggagcaagtttccaggaggagagaagaattccagtgaagcagcagctgcacgtccgaggcttggggaggacccaggactgtgtgggt

SEQ ID NO: 212 - DNA, 4285 bp, Homo sapiens
  CDS (20)..(4096)
agctcagaagccctcccacatgagaagaaacatacgaaagctactccgggaggatcaattggagcctgttaccaaagcagcacagcaagaagagttggaaagaaggaagcgcctggagcagcagaggaaagattatgcagcccctattcctactgttccgctggagttcctccctgaggaaattgctttaagggcaagtgacggtccccaactgcctcctcgggtcttggcccaggaagtcatttgtttggacagtagcagtggcagtgaggatgaaaaaagcagtcgagatgaggtgattgaactgagctctggagaggaggacactctgcacattgtggacagcagtgaatctgtcagtgaagatgatgaggaagaagagaagggtggcacccatgtcaatgatgtcttaaaccagcgtgacgcccttgggcgggtccttgtcaacctaaaccaccctccagaggaggaaaatgtcttccttgccccacagttggcacgggctgtgaaacctcatcagattggcgggatccggttcctttacgataacctagtggagtctctggagaggtttaagaccagcagtggctttggctgtattctggcccacagcatgggtctggggaaaactttgcaagtgatctctttcatcgacgtcctcttccgccacacgccagccaaaacagtccttgccattgtgccggttaatactcttcagaattggctggcagagttcaacatgtggcttccacctcctgaagccctcccggctgacaacaagcctgaagaagtccagcctcggttctttaaagttcacatcttgaatgatgagcacaagacgatggcatctcgtgctaaagtgatggctgattgggtgtcagagggtggcgtgctgctgatggggtacgagatgtacagactcctcactctgaagaaatcatttgccacaggtagaccgaagaaaaccaagaagcgttctcacccagtcatcattgatctagatgaggaagatcggcagcaggagtttcggagagagtttgagaaggctttatgccgccctggccctgatgtagtaatctgtgatgagggacaccgcatcaaaaactgccaggccagcacctcacaggctctgaagaatatccgctctcgccgccgggtggtgctgactgggtaccctctgcaaaacaacctcattgagtactggtgcatggtggactttgtgcgcccagacttccttggcacccggcaggagttcagcaacatgtttgaacgccctatcctgaatgggcaatgtattgacagcacacctcaggacgtccgcctcatgcggtaccggagccatgtcctgcacagtcttctggagggctttgtgcagaggagaggccacactgtgctgaagattcatctccctgccaaggaagaaaatgtgatccttgtgcggctctccaagatccagcgagatttgtatacacagttcatggatcgcttccgggactgtggtagcagcggttggctggggctgaacccccttaaggcattctgtgtgtgttgcaagatctggaatcaccctgatgtgctgtatgaagcccttcagaaggagagcttggccaatgagcaggacctagacgtggaagaacttggctctgcagggaccagtgcccgctgtccaccacagggaacaaaaggcaagggagaggatagcaccttggcttcctcgatgggagaggcaaccaatagcaagttcctacagggcgttggcttcaaccctttccaggagcgaggcaacaacattgtcacatatgaatgggccaaggaccttctgactaattaccagactggagtcctagaaaactctcccaagatggtactgcttttccacctgattgaggaaagtgtgaagcttggggacaagatccttgtgtttagccagagtctttccaccttggctctcatcgaggaattccttggaaaacgagaagtaccctgtccacctggtaccgaggggcaaggagcacagaagtgggttcgaaacatcagctacttccggctagatggtagcacccctgcctttgagagggagcggcttattaatcagttcaatgatcccagcaacctcaccacctggctgttccttctctctacaagggccggatgcttgggtgtgaatctgattggtgccaaccgagtggtggtgtttgatgcttcctggaacccttgccatgatgcccaggcagtatgtcgggtataccgttatggccagaaaaagccctgttacatctatcgccttgtggctgattacactctagaaaagaagatctatgaccgtcagatttccaagcagggcatgtcagatcgggtggtggatgatctaaatccaatgctgaacttcacacggaaagaggtggaaaacctactgcactttgttgagaaggagccagctccccaagtttccttgaacgtaaaggggatcaaggagtcagtcctgcaactggcctgtctgaagtaccctcacctcatcaccaaggagcctttcgagcatgagtcattgctcttgaaccgaaaggatcacaagctaaccaaggctgagaaaaaagcagcaaagaaaagctatgaggaagacaaacgcacatcagtcccctatacccgcccatcgtatgcgcagtattaccctgccagcgatcagagcctgaccagcatccccgccttcagccagagaaactggcagccaactttgaagggggatgaaaagcctgtggccagtgttcgtcctgtgcagtccacccccatccccatgatgccccggcatgtcccattgggaggaagtgtaagctctgcctccagcacaaatccatccatgaactttcccatcaactacttgcagcgtgcaggagtccttgtgcagaaggtggtcaccacgacagatattgttattcctggactcaacagctccacagatgtacaggcaagaattaatgctggtgagagcatccacatcatccgtgggacaaaagggacgtacatccgtaccagtgatggacggatctttgctgtccgggcaactggcaaaccaaaggttcctgaagatggtcggatggctgcctcaggttcccagggaccttcttgcgagtccacaagcaacggcagacacagtgcctcatcacccaaagcccccgaccctgaggggctggccaggcccgtctctcctgacagcccagagatcatcagtgagcttcagcagtatgcagatgtggctgctgcccgggaatcccgtcagagctccccaagcaccaatgccgccctgcctggccccccggcccaacttatggacagcagtgctgttcccgggacagctctcggaactgagcctcgactagggggtcattgcctcaatagttccctcttggtgactggccagccctgtggtgacaggcacccagtgctggacttaaggggccacaagcgaaagttggccacaccacctgctgcccaggagtcatcccgccggcggtccaggaagggtcatctgccagcccccgtgcagccgtatgaacacgggtatccagtctctggcgggtttgccatgccacccgtctccttaaaccataacctcaccacccccttcacctcccaggctggggagaactccctgtttatgggcagtaccccctcctactaccagctgtccaatttgctggcagatgcccgcctggtgtttccagtgactactgaccctctggtgccagcaggccccgtcagttcctcttccacggctacctcagtcactgccagcaacccctccttcatgctcaacccttctgtgccagggatactacccagctattcactcccattctcacagccactcctgtccgagccgaggatgtttgcgccttttccttcccctgtcttgcccagcaacctttcgcggggcatgtctatctatccaggctacatgtccccacatgcaggctacccagctggtggcctcctacggtcccaggtgcctccatttgactctcatgaggttgccgaggttgggttcagctccaatgatgatgaggataaagacgatgatgtgatagaggtcactgggaaatagctagggagcccctccccacctcacttggggcccccagcaggttgcccaccaagctggaaggcagtgatttagaccttttgagaataggacacttggcaggagggaaaaggaagaggacaaaggagggtggttggccaaagtggcagagctctgttgctgtttaacaaaagaggcaaaaaaaaaaaa

SEQ ID NO: 213 - DNA, 1547 bp, Homo sapiens
  CDS (267)..(938)
tttgcgctcggggaattaaaagaggggaaaaaaagcccgaagaaaactcacgccccaaacaaaacgcaaggagaggagggcgcgcggcctgcagccctcgcccgcgtccccggccgcggcgtgatgcgcgcggaccagcccgcgacgcccgggctgccgctgtccccgcacctggacgctggcgcggtggccgcgccccagcctcgatcgctcgccgcggcgactcggccccaggcttccggcgccggtgggggccctcgctctccatggggctgagggactggctgagaaccgtgtgctgctgctgccggtgcgagtgcttggaggagcgcgccctgcctgagaaggagcccctcgtcagtgataacaatccatattcctcatttggagcaactctggtgagggatgatgagaagaatttatggagtatgccccatgatgtgtcccacacagaggcagacgacgacagaaccctgtacaatttgatagtcattcgtaatcagcaggccaaagactcagaggagtggcagaagctcaactatgatatccataccctgcggcaggttcgaagggaagtaagaaacagatggaagtgcatcttagaagatttaggttttcaaaaggaagctgactctttgttgtcagtgactaaactcagcaccatcagtgattctaaaaacacaaggaaagctcgagagatgttgttaaaactggctgaagaaaccagtattttcccaacaagttgggagctctcagagagatatctctttgttgtggaccgtctcattgcacttgatgctgcagaagagttctttaagcttgctcgtcgaacttaccccaagaagcctggggttccatgcctggcagatggccagaaagaactgcacctgtggggggacctctcatgcagacttgcacatatgcagggagtattgcactgaagatctttgctggaccttcttctcttcagaagataattttcaaaagggagcaatgctgtgaatgcagcttgcttctctctacagattgagaagtccagcttcaaaagttacttgccacttaagcaaggaacttgtcaagagatcatggttcatgttactgaaaagactttaaggatttgtaaggttaatccatagattgctgagaacaatggaaatatttttatttttacagattttgcacttctgaattcaggttaaaaactaacttgtatttagtctgcttagaggactgtgacttgaaaatttttatataccaatgagctttttggtagcgtccacaatgtttaaaatatttcataggcgagatccgtgttctccatttattaatgcattgtagaccaatttaactgctgtgtttcaggaaaattcttcctagtttaataagcaagctaaaagttttattttttatatttagtgcttaatctttgcctcatgttatgtaaaattagcctgcagatattttctctcaattctgtagactctcgcaagataaacattcaaacagtgaaacaaacaataaaataaataaacctaaaaaaaaaaaaa

SEQ ID NO: 214 - DNA, 2320 bp, Homo sapiens
  CDS (323)..(1813)
ccgctccccgctgtcccccagcttactccaatcaagcctctgcccgccaggaacaggtaacctgtgtgtgtccgtttgctccttctaagagcatgcctgatagatacttcggtagcctctccggatggccccttcgtcgggtagcctctcctgatggggtccttcgcccaccctgcctcccgcgccgggctccgggtgaatgtcaagggtggctggctgcgaatacctccttcagctgctggggttcccgacagtttgcagtttttaaaagtgcaccctcggaagggcttttcagactgggtaaacctgacttttccaagagatggcagatcctgaggtagttgtgagtagctgcagctctcatgaagaggaaaatcgctgcaattttaaccagcaaacatctccatctgaggagcttctattagaagaccagatgaggcgaaaactcaaattttttttcatgaatccctgtgagaagttctgggctcgaggtagaaaaccatggaaacttgccatacaaattctaaaaattgcaatggtgactatccagtacttgcagctatacaatgtctccgttgggaatcatgcttatgagaacaaaggtaccaagcaatctgctatggcaatctgtcagcacttctacaagcgaggaaacatctaccctggaaatgatacctttgacatcgatccagaaattgaaactgagtgtttctttgtggagccagatgaaccttttcacattgggacaccagcagaaaataaactgaacttaacactggacttccacagactcctaacagtggagcttcagtttaaactgaaagccattaatctgcagacagttcgtcatcaagaactccctgactgttatgactttactctgactataacatttgacaacaaggcccatagtggaagaattaaaataagtttagataatgacatttccatcagagaatgtaaagactggcatgtatctggatcaattcagaagaacactcattacatgatgatctttgatgcctttgtcattctgacttgcttggtttcattaatcctctgcattagatctgtgattagaggacttcagcttcagcaggagtttgtcaattttttcctcctccattataagaaggaagtttctgtttctgatcaaatggaatttgtcaatggatggtacattatgattattattagtgacatattgacaatcattggatcaattctaaaaatggaaatccaagctaagagtctaactagttatgatgtctgtagcatacttcttgggacttctaccatgctcgtgtggcttggagtcatccgatacctcggtttctttgcaaagtacaacctcctcattttgacccttcaggcagcgctgcccaatgtcatcaggttctgctgctgtgcagctatgatttacttaggttactgcttctgtggatggatcgtgctggggccttaccatgacaagtttcgttctctgaacatggtctctgagtgccttttctctctgataaatggagatgatatgtttgccacgtttgcaaaaatgcagcaaaaaagttacttagtctggctgtttagtagaatttacctctactcattcatcagcctctttatatatatgattttaagtcttttcattgcactgatcactgatacatacgaaacaattaagcaataccaacaagatggcttcccagagactgaacttcgtacatttatatcagaatgcaaagatctacccaactctggaaaatacagattagaagatgaccctccagtatctttattctgctgttgtaaaaagtagctatcaggtttatctgtactttagaggaaaatataatgtgtagctgagttggaacactgtggatattctgagatcagatgtagtatgtttgaagactgttattttgagctaattgagacctataattcaccaataactgtttatatttttaaaagcaatatttaatgtctttgcaactttatgctgggattgtttttaaaaaaactttaatgaggaaagctattggattattattatttcttgtttattttgccatggctttagaatgtattctgtatgcctctcttttgctctgatactgttgctcctgctattctgattgtgcagactgtataattagtggaaaacaatccttggtctgactgtgactgtggacaaccagtaaacctggcttggaccactctcaggagtccaccttgagagagtgggtgtagttacatttatacagtaacattgcatgtgaaatctctcttgagaggaagataagagtgcacagaataagac

SEQ ID NO: 215 - DNA, 940 bp, Homo sapiens
  CDS (4)..(552)
gggatggcgacgcctcggccctgcgcggacgggccctgctgctcgcatcccagcgcggtgctcggcgtacagcagacgctggaggagatggacttcgagaggggaatctggtcggcagccctgaatggagacctgggccgagtgaagcatttaatccagaaggccgaggacccaagtcagcccgactcggccggctacactgcgctgcactatgccagccgcaatgggcactacgctgtgtgccagttcctgctggaaagcggagctaagtgtgatgcccagacccacgggggtgccactgctctgcaccgagccagctactgcgggcacactgaaatcgcgcggctcctgctatcacatgggtccaaccccagggtggtggatgacgacggcatgaccagtctgcataaggctgctgagaggggtcacggggacatctgctccctcctcctgcaacacagcccagccctgaaggccatccgggaccgaaaggcacggctagcatgtgacctgctgccttgcaacagtgacctgcgggacctgctatccagctgagccgccaccctatctccagctgccttgcaacagtgacctgcgggacctgctatccagctgagccgccaccctatctccagctgcctttaaagggtacacagaccagttctccaagcccctgccttggtcagcatccatgctgctgggcagggaactgaggccagaccacccaggaagagccccagtctggtcactgtggaagcgagggagtagatttggtgtggctaaaagtgtttaagactggacagatgatcatattctaaattagttcatatgagacatctatttatttggaaaaaaataaagttatatccttacctcatcccacacccaaagataaattgcaagattaaagatctaaatataaaaacacaaaaaaaaaaaa

SEQ ID NO: 216 - DNA, 736 bp, Homo sapiens
  CDS (4)..(348)
gggatggcgacgcctcggccctgcgcggacgggccctgctgctcgcatcccagcgcggtgctcggcgtacagcagacgctggaggagatggacttcgagaggggaatctggtcggcagccctgaatggagacctgggccgagtgaagcatttaatccagaaggccgaggacccaagtcagcccgactcggccggctacactgcgctggctgctgagaggggtcacggggacatctgctccctcctcctgcaacacagcccagccctgaaggccatccgggaccgaaaggcacggctagcatgtgacctgctgccttgcaacagtgacctgcgggacctgctatccagctgagccgccaccctatctccagctgccttgcaacagtgacctgcgggacctgctatccagctgagccgccaccctatctccagctgcctttaaagggtacacagaccagttctccaagcccctgccttggtcagcatccatgctgctgggcagggaactgaggccagaccacccaggaagagccccagtctggtcactgtggaagcgagggagtagatttggtgtggctaaaagtgtttaagactggacagatgatcatattctaaattagttcatatgagacatctatttatttggaaaaaaataaagttatatccttacctcatcccacacccaaagataaattgcaagattaaagatctaaatataaaaacacaaaaaaaaaaaa

SEQ ID NO: 217 - protein, 271 aa, Homo sapiens
MTAWILLPVSLSAFSITGIWTVYAMAVMNHHVCPVENWSYNESCPPDPAEQGGPKTCCTLDDVPLISKCGSYPPESCLFSLIGNMGAFMVALICLLRYGQLLEQSRHSWVNTTALITGCTNAAGLLVVGNFQVDHARSLHYVGAGVAFPAGLLFVCLHCALSYQGATAPLDLAVAYLRSVLAVIAFITLVLSGVFFVHESSQLQHGAALCEWVCVIDILIFYGTFSYEFGAVSSDTLVAALQPTPGRACKSSGSSSTSTHLNCAPESIAMI

SEQ ID NO: 218 - protein, 237 aa, Homo sapiens
MLGGSLGSRLLRGVGGSHGRFGARGVREGGAAMAAGESMAQRMVWVDLEMTGLDIEKDQIIEMACLITDSDLNILAEGPNLIIKQPDELLDSMSDWCKEHHGKSGLTKAVKESTITLQQAEYEFLSFVRQQTPPGLCPLAGNSVHEDKKFLDKYMPQFMKHLHYRIIDVSTVKELCRRWYPEEYEFAPKKAASHRALDDISESIKELQFYRNNIFKKKIDEKKRKIIENGENEKTVS

SEQ ID NO: 219 - protein, 334 aa, Homo sapiens
MATLKEKLIAPVAEEEATVPNNKITVVGVGQVGMACAISILGKSLADELALVDVLEDKLKGEMMDLQHGSLFLQTPKIVADKDYSVTANSKIVVVTAGVRQQEGESRLNLVQRNVNVFKFIIPQIVKYSPDCIIIVVSNPVDILTYVTWKLSGLPKHRVIGSGCNLDSARFRYLMAEKLGIHPSSCHGWILGEHGDSSVAVWSGVNVAGVSLQELNPEMGTDNDSENWKEVHKMVVESAYEVIKLKGYTNWAIGLSVADLIESMLKNLSRIHPVSTMVKGMYGIENEVFLSLPCILNARGLTSVINQKLKDDEVAQLKKSADTLWDIQKDLKDL

SEQ ID NO: 220 - protein, 426 aa, Homo sapiens
MSEADGLRQRRPLRPQVVTDDDGQAPEAKDGSSFSGRVFRVTFLMLAVSLTVPLLGAMMLLESPIDPQPLRQISGIALFCSFKEPPLLLGVLHPNTKLRQAERLFENQLVGPESIAHIGDVMFTGTADGRVVKLENGEIETIARFGSGPCKTRDDEPVCGRPLGIRAGPNGTLFVADAYKGLFEVNPWKREVKLLLSSETPIEGKNMSFVNDLTVTQDGRKIYFTDSSSKWQRRDYLLLVMEGTDDGRLLEYDTVTREVKVLLDQLRFPNGVQLSPAEDFVLVAETTMARIRRVYVSGLMKGGADLFVENMPGFPDNIRPSSSGGYWVGMSTIRPNPGFSMLDFLSERPWIKRMIFKLFSQETVMKFVPRYSLVLELSDSGAFRRSLHDPDGLVATYISEVHEHDGHLYLGSFRSPFLCRLSLQAV

SEQ ID NO: 221 - protein, 309 aa, Homo sapiens
MSWCNELRLPALKQHSIGRGLESHITMCIPPSYADLGKAARDIFNKGFGFGLVKLDVKTKSCSGVEFSTSGSSNTDTGKVTGTLETKYKWCEYGLTFTEKWNTDNTLGTEIAIEDQICQGLKLTFDTTFSPNTGKKSGKIKSSYKRECINLGCDVDFDFAGPAIHGSAVFGYEGWLAGYQMTFDSAKSKLTRNNFAVGYRTGDFQLHTNVNDGTEFGGSIYQKVCEDLDTSVNLAWTSGTNCTRFGIAAKYQLDPTASISAKVNNSSLIGVGYTQTLRPGVKLTLSALVDGKSINAGGHKVGLALELEA

SEQ ID NO: 222 - protein, 136 aa, Homo sapiens
MASVRIREAKEGDCGDILRLIRELAEFEKLSDQVKISEEALRADGFGDNPFYHCLVAEILPAPGKLLGQGIGSKIIKKVAEVALDKGCSQFRLAVLDWNQRAMDLYKALGAQDLTEAEGWHFFCFQGEATRKLAGK

SEQ ID NO: 223 - protein, 102 aa, Homo sapiens
MSARVRSRSRGRGDGQEAPDVVAFVAPGESQQEEPPTDNQDIEPGQEREGTPPIEERKVEGDCQEMDLEKTRSERGDGSDVKEKTPPNPKHAKTKEAGDGQP

SEQ ID NO: 224 - protein, 1162 aa, Homo sapiens
MNGHHQQNGVENMMLFEVVKMGKSAMQSVVDDWIESYKHDRDIALLDLINFFIQCSGCKGVVTAEMFRHMQNSEIIRKMTEEFDEDSGDYPLTMAGPQWKKFKSSFCEFIGVLVRQCQYSIIYDEYMMDTVISLLTGLSDSQVRAFRHTSTLAAMKLMTALVNVALNLSINMDNTQRQYEAERNKMIGKRANERLELLLQKRKELQENQDEIENMMNAIFKGVFVHRYRDAIREIRAICIEEIGIWMKMYSDAFLNDSYLKYVGWTMHDKQGEVRLKCLTALQGLYYNKELNSKLELFTSRFKDRIVSMTLDKEYDVAVQAIKLLTLVLQSSEEVLTAEDCENVYHLVYSAHRPVAVAAGEFLYKKLFSRRDPEEDGMMKRRGRQGPNANLVKTLVFFFLESELHEHAAYLVDSMWDCATELLKDWECMNSLLLEEPLSGEEALTDRQESALIEIMLCTIRQAAECHPPVGRGTGKRVLTAKEKKTQLDDRTKITELFAVALPQLLAKYSVDAEKVTNLLQLPQYFDLEIYTTGRLEKHLDALLRQIRNIVEKHTDTDVLEACSKTYHALCNEEFTIFNRVDISRSQLIDELADKFNRLLEDFLQEGEEPDEDDAYQVLSTLKRITAFHNAHDLSKRDLFACNYKLLKTGIENGDMPEQIVIHALQCTHYVILWQLAKITESSSTKEDLLRLKKQMRVFCQICQHYLTNVNTTVKEQAFTILCDILMIFSHQIMSGGRDMLEPLVYTPDSSLQSELLSFILDHVFIEQDDDNNSADGQQEDEASKIEALHKRRNLLAAFCKLIVYTVVEMNTAADIFKQYMKYYNDYGDIIKETMSKTRQIDKIQCAKTLILSLQQLFNEMIQENGYNFDRSSSTFSGIKELARRFALTFGLDQLKTREAIAMLHKDGIEFAFKEPNPQGESHPPLNLAFLDILSEFSSKLLRQDKRTVYVYLEKFMTFQMSLRREDVWLPLMSYRNSLLAGGDDDTMSVISGISSRGSTVRSKKSKPSTGKRKVVEGMQLSLTEESSSSDSMWLSREQTLHTPVMMQTPQLTSTIMREPKRLRPEDSFMSVYPMQTEHHQTPLDYNRRGTSLMEDDEEPIVEDVMMSSEGRIEDLNEGMDFDTMDIDLPPSKNRRERTELKPDFFDPASIMDESVLGVSMF

SEQ ID NO: 225 - protein, 133 aa, Homo sapiens
MNHTVQTFFSPVNSGQPPNYEMLKEEHEVAVLGAPHNPAPPTSTVIHIRSETSVPDHVVWSLFNTLFMNPCCLGFIAFAYSVKSRDRKMVGDVTGAQAYASTAKCLNIWALILGILMTILLIVIPVLIFQAYG

SEQ ID NO: 226 - protein, 377 aa, Homo sapiens
MAEEVVVVAKFDYVAQQEQELDIKKNERLWLLDDSKSWWRVRNSMNKTGFVPSNYVERKNSARKASIVKNLKDTLGIGKVKRKPSVPDSASPADDSFVDPGERLYDLNMPAYVKFNYMAEREDELSLIKGTKVIVMEKCSDGWWRGSYNGQVGWFPSNYVTEEGDSPLGDHVGSLSEKLAAVVNNLNTGQVLHVVQALYPFSSSNDEELNFEKGDVMDVIEKPENDPEWWKCRKINGMVGLVPKNYVTVMQNNPLTSGLEPSPPQCDYIRPSLTGKFAGNPWYYGKVTRHQAEMALNERGHEGDFLIRDSESSPNDFSVSLKAQGKNKHFKVQLKETVYCIGQRKFSTMEELVEHYKKAPIFTSEQGEKLYLVKHLS

SEQ ID NO: 227 - protein, 255 aa, Homo sapiens [sequence omitted]

SEQ ID NO: 228 - protein, 371 aa, Homo sapiens
MGHKVVVFDISVIRALWETRVKKHKAWQKKEVERLEKSALEKIKEEWNFVAECRRKGIPQAVYCKNGFIDTSVRLLDKIERNTLTRQSSLPKDRGKRSSAFVFELSGEHWTELPDSLKEQTHLREWYISNTLIQIIPTYIQLFQAMRILDLPKNQISHLPAEIGCLKNLKELNVGFNYLKSIPPELGDCENLERLDCSGNLELMELPFELSNLKQVTFVDISANKFSSVPICVLRMSNLQWLDISSNNLTDLPQDIDRLEELQSFLLYKNKLTYLPYSMLNLKKLTLLVVSGDHLVELPTALCDSSTPLKFVSLMDNPIDNAQCEDGNEIMESERDRQHFDKEVMKAYIEDLKERESVPSYTTKVSFSLQL

SEQ ID NO: 229 - protein, 116 aa, Homo sapiens
MRRDDSAHASMVNVPKTRRTFCKKCGKHQPHKVTQYKKGKDSLYAQGKRRYDRKQSGYGGQTKPIFRKKAKTTKKIVLRLECVEPNCRSKRMLAIKRCKHFELGGDKKRKGQVIQF

SEQ ID NO: 230 - protein, 386 aa, Homo sapiens
MELKAKARELREECRSLRSRCDQLEERVSVMENEMNEMKREGKFREKRIKRNEQSLQEIWDYVKRPNLHLIGVPESDGENGTKLENTLQDIIQENFPNLARQANIQIQEIQRTPQRYSSRRATPRHIIVRITKVEMKEKMLRAAREKGRVPHKGKPIRLTADLSSETLQARREWGPIFNILKRIFSFPQRGGTGGRRMVKLTAELIEQAAQYTSAVRDRELDLRGYKIPVIENLGATLDQFDAIDFSDNEIRKLDGFPLLRRLKTLLVNKTEYASTGFPESETKERQEAEKMFKGKRGAQLAKDIARRSKTFNPGAGLPTDKKKGGPSPGDVEAIKNAIANASTLAEVERLKGLLQSGQIPGRERRSGPTDDGEEEMEEDTVTNGS

SEQ ID NO: 231 - protein, 1239 aa, Homo sapiens
MAAAFGHGGGLAFPGAPAVAGATSPAGPRERRRGRGRKSRAVTVAGVRPSSPHGLVGAVSVGGAGVMAVETLSPDWEFDRVDDGSQKIHAEVQLKNYGKFLEEYTSQLRRIEDALDDSIGDVWDFNLDPIALKLLPYEQSSLLELIKTENKVLNKVITVYAALCCEIKKLKYEAETKFYNGLLFYGEGATDASMVEGDCQIQMGRFISFLQELSCFVTRCYEVVMNVVHQLAALYISNKIAPKIIETTGVHFQTMYEHLGELLTVLLTLDEIIDNHITLKDHWTMYKRLLKSVHHNPSKFGIQEEKLKPFEKFLLKLEGQLLDGMIFQACIEQQFDSLNGGVSVSKNSTFAEEFAHSIRSIFANVEAKLGEPSEIDQRDKYVGICGLFVLHFQIFRTIDKKFYKSLLDICKKVPAITLTANIIWFPDNFLIQKIPAAAKLLDRKSLQAIKIHRDTFLQQKAQSLTKDVQSYYVFVSSWMMKMESILSKEQRMDKFAEDLTNRCNVFIQGFLYAYSISTIIKTTMNLYMSMQKPMTKTSVKALCRLVELLKAIEHMFYRRSMVVADSVSHITQHLQHQALHSISVAKKRVISDKKYSEQRLDVLSALVLAENTLNGPSTKQRRLIVSLALSVGTQMKTFKDEELFPLQVVMKKLDLISELRERVQTQCDCCFLYWHRAVFPIYLDDVYENAVDAARLHYMFSALRDCVPAMMHARHLESYEILLDCYDKEIMEILNEHLLDKLCKEIEKDLRLSVHTHLKLDDRNPFKVGMKDLALFFSLNPIRFFNRFIDIRAYVTHYLDKTFYNLTTVALHDWATYSEMRNLATQRYGLVMTEAHLPSQTLEQGLDVLEIMRNIHIFVSRYLYNLNNQIFIERTSNNKHLNTINIRHIANSIRTHGTGIMNTTVNFTYQFLKKKFYIFSQFMYDEHIKSRLIKDIRFFREIKDQNDHKYPFDRAEKFNRGIRKLGITPEGQSYLDQFRQLISQIGNAMGYVRMIRSGGLHCSSNAIRFVPDLEDIVNFEELVKEEGLAEETLKAARHLDSVLSDHTRNSAEGTEYFKMLVDVFAPEFRRPKNIHLRNFYIIVPPLTLNFVEHSISCKEKLNKKNKIGAAFTDDGFAMGVAYILKLLDQYREFDSLHWFQSVREKYLKEIRAVAKQQNVQSASQDEKLLQTMNLTQKRLDVYLQEFELLYFSLSSARIFFRADKTAAEENQEKKEKEEETKTSNGDLSDSTVSADPVVK

SEQ ID NO: 232 - protein, 127 aa, Homo sapiens
MSSQIRQNYSTDVEAAVNSLVNLYLQASYTYLSLGFYFDRDDVALEGVSHFFRELAEEKREGYERLLKMQNQRGGRALFQDIKKPAEDEWGKTPDAMKAAMALEKKLNQALLDLHAMGSARTDPHLM

SEQ ID NO: 233 - protein, 308 aa, Homo sapiens
MAPPAPGPASGGSGEVDELFDVKNAFYIGSYQQCINEAQRVKLSSPERDVERDVFLYRAYLAQRKFGVVLDEIKPSSAPELQAVRMFADYLAHESRRDSIVAELDREMSRSVDVTNTTFLLMAASIYLHDQNPDAALRALHQGDSLECTAMTVQILLKLDRLDLARKELKRMQDLDEDATLTQLATAWVSLATGGEKLQDAYYIFQEMADKCSPTLLLLNGQAACHMAQGRWEAAEGLLQEALDKDSGYPETLVNLIVLSQHLGKPPEVTNRYLSQLKDAHRSHPFIKEYQAKENDFDRLVLQYAPSA

SEQ ID NO: 234 - protein, 3256 aa, Homo sapiens
MWPTRRLVTIKRSGVDGPHFPLSLSTCLFGRGIECDIRIQLPVVSKQHCKIEIHEQEAILHNFSSTNPTQVNGSVIDEPVRLKHGDVITIIDRSFRYENESLQNGRKSTEFPRKIREQEPARRVSRSSFSSDPDEKAQDSKAYSKITEGKVSGNPQVHIKNVKEDSTADDSKDSVAQGTTNVHSSEHAGRNGRNAADPISGDFKEISSVKLVSRYGELKSVPTTQCLDNSKKNESPFWKLYESVKKELDVKSQKENVLQYCRKSGLQTDYATEKESADGLQGETQLLVSRKSRPKSGGSGHAVAEPASPEQELDQNKGKGRDVESVQTPSKAVGASFPLYEPAKMKTPVQYSQQQNSPQKHKNKDLYTTGRRESVNLGKSEGFKAGDKTLTPRKLSTRNRTPAKVEDAADSATKPENLSSKTRGSIPTDVEVLPTETEIHNEPFLTLWLTQVERKIQKDSLSKPEKLGTTAGQMCSGLPGLSSVDINNFGDSINESEGIPLKRRRVSFGGHLRPELFDENLPPNTPLKRGEAPTKRKSLVMHTPPVLKKIIKEQPQPSGKQESGSEIHVEVKAQSLVISPPAPSPRKTPVASDQRRRSCKTAPASSSKSQTEVPKRGGERVATCLQKRVSISRSQHDILQMICSKRRSGASEANLIVAKSWADVVKLGAKQTQTKVIKHGPQRSMNKRQRRPATPKKPVGEVHSQFSTGHANSPCTIIIGKAHTEKVHVPARPYRVLNNFISNQKMDFKEDLSGIAEMFKTPVKEQPQLTSTCHIAISNSENLLGKQFQGTDSGEEPLLPTSESFGGNVFFSAQNAAKQPSDKCSASPPLRRQCIRENGNVAKTPRNTYKMTSLETKTSDTETEPSKTVSTVNRSGRSTEFRNIQKLPVESKSEETNTEIVECILKRGQKATLLQQRREGEMKEIERPFETYKENIELKENDEKMKAMKRSRTWGQKCAPMSDLTDLKSLPDTELMKDTARGQNLLQTQDHAKAPKSEKGKITKMPCQSLQPEPINTPTHTKQQLKASLGKVGVKEELLAVGKFTRTSGETTHTHREPAGDGKSIRTFKESPKQILDPAARVTGMKKWPRTPKEEAQSLEDLAGFKELFQTPGPSEESMTDEKTTKIACKSPPPESVDTPTSTKQWPKRSLRKADVEEEFLALRKLTPSAGKAMLTPKPAGGDEKDIKAFMGTPVQKLDLAGTLPGSKRQLQTPKEKAQALEDLAGFKELFQTPGHTEELVAAGKTTKIPCDSPQSDPVDTPTSTKQRPKRSIRKADVEGELLACRNLMPSAGKAMHTPKPSVGEEKDIIIFVGTPVQKLDLTENLTGSKRRPQTPKEEAQALEDLTGFKELFQTPGHTEEAVAAGKTTKMPCESSPPESADTPTSTRRQPKTPLEKRDVQKELSALKKLTQTSGETTHTDKVPGGEDKSINAFRETAKQKLDPAASVTGSKRHPKTKEKAQPLEDLAGWKELFQTPVCTDKPTTHEKTTKIACRSQPDPVDTPTSSKPQSKRSLRKVDVEEEFFALRKRTPSAGKAMHTPKPAVSGEKNIYAFMGTPVQKLDLTENLTGSKRRLQTPKEKAQALEDLAGFKELFQTRGHTEESMTNDKTAKVACKSSQPDLDKNPASSKRRLKTSLGKVGVKEELLAVGKLTQTSGETTHTHTEPTGDGKSMKAFMESPKQILDSAASLTGSKRQLRTPKGKSEVPEDLAGFIELFQTPSHTKESMTNEKTTKVSYRASQPDLVDTPTSSKPQPKRSLRKADTEEEFLAFRKQTPSAGKAMHTPKPAVGEEKDINTFLGTPVQKLDQPGNLPGSNRRLQTRKEKAQALEELTGFRELFQTPCTDNPTADEKTTKKILCKSPQSDPADTPTNTKQRPKRSLKKADVEEEFLAFRKLTPSAGKAMHTPKAAVGEEKDINTFVGTPVEKLDLLGNLPGSKRRPQTPKEKAKALEDLAGFKELFQTPGHTEESMTDDKITEVSCKSPQPDPVKTPTSSKQRLKISLGKVGVKEEVLPVGKLTQTSGKTTQTHRETAGDGKSIKAFKESAKQMLDPANYGTGMERWPRTPKEEAQSLEDLAGFKELFQTPDHTEESTTDDKTTKIACKSPPPESMDTPTSTRRRPKTPLGKRDIVEELSALKQLTQTTHTDKVPGDEDKGINVFRETAKQKLDPAASVTGSKRQPRTPKGKAQPLEDLAGLKELFQTPVCTDKPTTHEKTTKIACRSPQPDPVGTPTIFKPQSKRSLRKADVEEESLALRKRTPSVGKAMDTPKPAGGDEKDMKAFMGTPVQKLDLPGNLPGSKRWPQTPKEKAQALEDLAGFKELFQTPGTDKPTTDEKTTKIACKSPQPDPVDTPASTKQRPKRNLRKADVEEEFLALRKRTPSAGKAMDTPKPAVSDEKNINTFVETPVQKLDLLGNLPGSKRQPQTPKEKAEALEDLVGFKELFQTPGHTEESMTDDKITEVSCKSPQPESFKTSRSSKQRLKIPLVKVDMKEEPLAVSKLTRTSGETTQTHTEPTGDSKSIKAFKESPKQILDPAASVTGSRRQLRTRKEKARALEDLVDFKELFSAPGHTEESMTIDKNTKIPCKSPPPELTDTATSTKRCPKTRPRKEVKEELSAVERLTQTSGQSTHTHKEPASGDEGIKVLKQRAKKKPNPVEEEPSRRRPRAPKEKAQPLEDLAGFTELSETSGHTQESLTAGKATKIPCESPPLEVVDTTASTKRHLRTRVQKVQVKEEPSAVKFTQTSGETTDADKEPAGEDKGIKALKESAKQTPAPAASVTGSRRRPRAPRESAQAIEDLAGFKDPAAGHTEESMTDDKTTKIPCKSSPELEDTATSSKRRPRTRAQKVEVKEELLAVGKLTQTSGETTHTDKEPVGEGKGTKAFKQPAKRNVDAEDVIGSRRQPRAPKEKAQPLEDLASFQELSQTPGHTEELANGAADSFTSAPKQTPDSGKPLKISRRVLRAPKVEPVGDVVSTRDPVKSQSKSNTSLPPLPFKRGGGKDGSVTGTKRLRCMPAPEEIVEELPASKKQRVAPRARGKSSEPVVIMKRSLRTSAKRIEPAEELNSNDMKTNKEEHKLQDSVPENKGISLRSRRQDKTEAEQQITEVFVLAERIEINRNEKKPMKTSPEMDIQNPDDGARKPIPRDKVTENKRCLRSARQNESSQPKVAEESGGQKSAKVLMQNQKGKGEAGNSDSMCLRSRKTKSQPAASTLESESVQRVTRSVKRCAENPKKAEDNVCVKKIRTRSHRDSEDI

SEQ ID NO: 235 - protein, 327 aa, Homo sapiens
MGKWEFIANEYGGAYIYKFFRVAEKGHAQDCDLDWNALPERGMRREVVVASEDELAASGLPSCDAAVNLAGENILNPLRRSARALKLIPTRAQGGQCPTDENLWNETFQKEVIGSRLETTQLLAKAITKAPQPPKAWVLVTGVAYYQPSLTAEYDEDSPGGDFDFFSNLVTKWEAAARLPGDSTRQVVVRSGVVLGRGGGAMGHMLLPFRLGLGGPIGSGHQFFPWIHIGDLAGILTHALEANHVHGVLNGVAPSSATNAEFAQTFGAALGRRAFIPLPSAVVQAVFGRQRAIMLLEGQKVIPRRTLATGYQYSFPELGAALKEIVA

SEQ ID NO: 236 - protein, 596 aa, Homo sapiens
MPVIPATQEAEAEESLDPGRRRLRTIGKLEPSYVIRKFLDAQRIHNLTAYLQTLHRQSLANADHTTLLLNCYTKLKDSSKLEEFIKKKSESEVHFDVETAIKVLRQAGYYSHALYLAENHAHHEWYLKIQLEDIKNYQEALRYIGKLPFEQAESNMKRYGKILMHHIPEQTTQLLKGLCTDYRPSLEGRSDREAPGCRANSEEFIPIFANNPRELKAFLEHMSEVQPDSPQGIYDTLLELRLQNWAHEKDPQVKEKLHAEAISLLKSGRFCDVFDKALVLCQMHDFQDGVLYLYEQGKLFQQIMHYHMQHEQYRQVISVCERHGEQDPSLWEQALSYFARKEEDCKEYVAAVLKHIENKNLMPPLLGTWEDRWDELRVRRYREETTRIRQEIQELKASPKIFQKTKCSICNSALELPSVHFLCGHSFHQHCFESYSESDADCPTCLPENRKVMDMIRAQEQKRDLHDQFQHQPPKDDKKKKDAGKSAKKDKDPVNKSGGKAKKKKWSKGKVRDKLNNLVLFDKATYDKLCKEVPNYKLITPAVVSERLKIRGSLARAALQELLSKGLIKLVSKHRAQVIYTRNTKGGDAPAAGEDA

SEQ ID NO: 237 - protein, 297 aa, Homo sapiens [sequence omitted]

SEQ ID NO: 238 - protein, 156 aa, Homo sapiens [sequence omitted]

SEQ ID NO: 239 - protein, 487 aa, Homo sapiens
MDGTETRQRRLDSCGKPGELGLPHPLSTGGLPVASEDGALRAPESQSVTPKPLETEPSRETAWSIGLQVTVPFMFAGLGLSWAGMLLDYFQHWPVFVEVKDLLTLVPPLVGLKGNLEMTLASRLSTAANTGQIDDPQEQHRVISSNLALIQVQATVVGLLAAVAALLLGVVSREEVDVAKVELLCASSVLTAFLAAFALGVLMVCIVIGARKLGVNPDNIATPIAASLGDLITLSILALVSSFFYRHKDSRYLTPLVCLSFAALTPVWVLIAKQSPPIVKILKFGWFPIILAMVISSFGGLILSKTVSKQQYKGMAIFTPVICGVGGNLVAIQTSRISTYLHMWSAPGVLPLQMKKFWPNPCSTFCTSEINSMSARVLLLLVVPGHLIFFYIIYLVEGQSVINSQTFVVLYLLAGLIQVTILLYLAEVMVRLTWHQALDPDNHCIPYLTGLGDLLGTGLLALCFFTDWLLKSKAELGGISELASGPP

SEQ ID NO: 240 - protein, 507 aa, Homo sapiens
MCDIEEATNQLLDVNLHENQKSVQVTESDLGSESELLVTIGATVPTGFEQTAADEVREKLGSSCKISRDRGKIYFVISVESLAQVHCLRSVDNLFVVVQEFQDYQFKQTKEEVLKDFEDLAGKLPWSNPLKVWKINASFKKKKAKRKKINQNSSKEKINNGQEVKIDQRNVKKEFTSHALDSHILDYYENPAIKEDVSTLIGDDLASCKDETDESSKEETEPQVLKFRVTCNRAGEKHCFTSNEAARDFGGAVQDYFKWKADMTNFDVEVLLNIHDNEVIVGIALTEESLHRRNITHFGPTTLRSTLAYGMLRLCDPLPYDIIVDPMCGTGAIPIEGATEWSDCFHIAGDNNPLAVNRAANNIASLLTKSQIKEGKPSWGLPIDAVQWDICNLPLRTGSVDIIVTDLPFGKRMGSKKRNWNLYPACLREMSRVCTPTTGRAVLLTQDTKCFTKALSGMRHVWRKVDTVWVNVGGLRAAVYVLIRTPQAFVHPSEQDGERGTLWQCKE

SEQ ID NO: 241 - protein, 266 aa, Homo sapiens
MRVTLATIAWMVSFVSNYSHTANILPDIENEDFIKDCVRIHNKFRSEVKPTASDMLYMTWDPALAQIAKAWASNCQFSHNTRLKPPHKLHPNFTSLGENIWTGSVPIFSVSSAITNWYDEIQDYDFKTRICKKVCGHYTQVVWADSYKVGCAVQFCPKVSGFDALSNGAHFICNYGPGGNYPTWPYKRGATCSACPNNDKCLDNLCVNRQRDQVKRYYSVVYPGWPIYPRNRYTSLFLIVNSVILILSVIITILVQHKYPNLVLLD

SEQ ID NO: 242 - protein, 890 aa, Homo sapiens
MNYVGQLAGQVFVTVKELYKGLNPATLSGCIDIIVIRQPNGNLQCSPFHVRFGKMGVLRSREKVVDIEINGESVDLHMKLGDNGEAFFVQETDNDQEVIPMHLATSPILSEGASRMECQLKRGSVDRMRGLDPSTPAQVIAPSETPSSSSVVKKRRKRRRKSQLDSLKRDDNMNTSEDEDMFPIEMSSDEAMELLESSRTLPNDIPPFQDDIPEENLSLAVIYPQSASYPNSDREWSPTPSPSGSRPSTPKSDSELVSKSTERTGQKNPEMLWLWGELPQAAKSSSPHKMKESSPLSSRKICDKSHFQAIHSESSDTFSDQSPTLVGGALLDQNKPQTEMQFVNEEDLETLGAAAPLLPMIEELKPPSASVVQTANKTDSPSRKRDKRSRHLGADGVYLDDLTDMDPEVAALYFPKNGDPSGLAKHASDNGARSANQSPQSVGSSGVDSGVESTSDGLRDLPSIAISLCGGLSDHREITKDAFLEQAVSYQQFVDNPAIIDDPNLVVKIGSKYYNWTTAAPLLLAMQAFQKPLPKATVESIMRDKMPKKGGRWWFSWRGRNTTIKEESKPEQCLAGKAHSTGEQPPQLSLATRVKHESSSSDEERAAAKPSNAGHLPLLPNVSYKKTLRLTSEQLKSLKLKNGPNDVVFSVTTQYQGTCRCEGTIYLWNWDDKVIISDIDGTITRSDTLGHILPTLGKDWTHQGIAKLYHKVSQNGYKFLYCSARAIGMADMTRGYLHWVNERGTVLPQGPLLLSPSSLFSALHREVIEKKPEKFKVQCLTDIKNLFFPNTEPFYAAFGNRPADVYSYKQVGVSLNRIFTVNPKGELVQEHAKTNISSYVRLCEVVDHVFPLLKRSHSSDFPCSDTFSNFTFWREPLPPFENQDIHSASA

SEQ ID NO: 243 - protein, 132 aa, Homo sapiens [sequence omitted]

SEQ ID NO: 244 - protein, 211 aa, Homo sapiens [sequence omitted]

SEQ ID NO: 245 - protein, 257 aa, Homo sapiens
MVQLRPRASRAPASAEAMVDEGQLASEEEEAEHGLLLGQPSSGAAAEPLEEDDEGDDEFDDEAPEELTFASAQAEAREEERRVRETVRRDKTLLKEKRKRREELFIEQKKRKLLPDTILEKLTTASQTNIKKSPGKVKEVNLQKKNEDCEKGNDSKKVKVQKVQSVSQNKSYLAVRLKDQDLRDSRQQAAQAFIHNSLYGPGTNRTTVNKFLSLANKRLPVKRAAVQFLNNAWGIQKKQNAKRFKRRWMVRKMKTKK

SEQ ID NO: 246 - protein, 217 aa, Homo sapiens
MPTPHEAEKQITGPEEADRPPSMSSHDTASPAAPSRNPCCLCWCCCCSCSWNQERRRAWQASRESKLQPLPSCEVCATPSPEEVQSWAQSFDKLMHSPAGRSVFRAFLRTEYSEENMLFWLACEELKAEANQHVVDEKARLIYEDYVSILSPKEVSLDSRVREGINKKMQEPSAHTFDDAQLQIYTLMHRDSYPRFLSSPTYRALLLQGPSQSSSEA

SEQ ID NO: 247 - protein, 1036 aa, Homo sapiens
MVSTLIKHNTSLDQPCVKRWSAMHEAAKQGRKDIVALLLKHGGNVHLRDGFGVTPLGVAAEYGHCDVLEHLIHKGGDVLALADDGASVLFEAAGGGNPDCISLLLEYGGSGNVPNRAGHLPIHRAAYEGHYLALKYLIPVTSKNAIRKSGLTPIHSAADGQNAQCLELLIENGFDVNTLLADHISQSYDDERKTALYFGVSNNDVHCTEVLLAAGADPNLDPLNCLLVAVRANNYEIVRLLLSHGANVNCYFMHVNDTRFPSVIQYALNDEVMLRLLLNNGYQVEMCFDCMHGDIFGNSFVWSEIQEEVLPGWTSCVIKDNPDLESSKVTVVMTLRREPYQGDRCLGCSPSTSFFLILQRTTLSKLVRPTLGVSGQRKGLSSEDLFETAPSGSDKAGTMSTFGYRRGLSKYESIDEDELLASLSAEELKELERELEDIEPDRNLPVGLRQKSLTEKTPTGTFSREALMAYWEKESQKLLEKERLGECGKLSVVARHDEQELADGGCKSNSHNRENLRAAVGWLGEQGSCVAEDKEESEEELIFTESNSEVSEEVYTEEEEEESQEEEEEEDSDEEERTIETAKGINGTVNYDSVNSDNSKPKIFKSQIENINLTNGSNGRNTESPAAIHPCGNPTVIEDALDKIKSNDPDTTEVNLNNIENITTQTLTRFAEALKDNTVVKTFSLANTHADDSAAMAIAEMLKVNEHITNVNVESNFITGKGILAIMRALQHNTVLTELRFHNQRHIMGSQVEMEIVKLLKENTTLLRLGYHFELPGPRMSMTSILTRNMDKQRQKRLQEQKQQEGYDGGPNLRTKVWQRGTPSSSPYVSPRHSPWSSPKLPKKVQTVRSRPLSPVATPPPPPPPPPPPPPSSQRLPPPPPPPPPPLPEKKLITRNIAEVIKQQESAQRALQNGQKKKKGKKVKKQPNSILKEIKNSLRSVQEKKMEDSSRPSTPQRSAHENLMEAIRGSSIKQLKRMTEVPCDDQMLGQCRVTAANEPKYNHMHQSQRLAPQNKPAFLVRDGHRMLAASINTQMI

SEQ ID NO: 248 - protein, 996 aa, Homo sapiens
MVSTLIKHNTSLDQPCVKRWSAMHEAAKQGRKDIVALLLKHGGNVHLRDGFGVTPLGVAAEYGHCDVLEHLIHKGGDVLALADDGASVLFEAAGGGNPDCISLLLEYGGSGNVPNRAGHLPIHRAAYEGHYLALKYLIPVTSKNAIRKSGLTPIHSAADGQNAQCLELLIENGFDVNTLLADHISQSYDDERKTALYFGVSNNDVHCTEVLLAAGADPNLDPLNCLLVAVRANNYEIVRLLLSHGANVNCYFMHVNDTRFPSVIQYALNDEVMLRLLLNNGYQVEMCFDCMHGDIFGNSFVWSEIQEEVLPGWTSCVIKDNPDLESSKVTVVMTLRREPYQGDRCLGCSPSTSFFLILQRTTLSKLVRPTLGVSGQRKGLSSEDLFETAPSGSDKAGTMSTFGYRRGLSKYESIDEDELLASLSAEELKELERELEDIEPDRNLPVGLRQKSLTEKTPTGTFSREALMAYWEKESQKLLEKERLGECGKVAEDKEESEEELIFTESNSEVSEEVYTEEEEEESQEEEEEEDSDEEERTIETAKGINGTVNYDSVNSDNSKPKIFKSQIENINLTNGSNGRNTESPAAIHPCGNPTVIEDALDKIKSNDPDTTEVNLNNIENITTQTLTRFAEALKDNTVVKTFSLANTHADDSAAMAIAEMLKVNEHITNVNVESNFITGKGILAIMRALQHNTVLTELRFHNQRHIMGSQVEMEIVKLLKENTTLLRLGYHFELPGPRMSMTSILTRNMDKQRQKRLQEQKQQEGYDGGPNLRTKVWQRGTPSSSPYVSPRHSPWSSPKLPKKVQTVRSRPLSPVATPPPPPPPPPPPPPSSQRLPPPPPPPPPPLPEKKLITRNIAEVIKQQESAQRALQNGQKKKKGKKVKKQPNSILKEIKNSLRSVQEKKMEDSSRPSTPQRSAHENLMEAIRGSSIKQLKRMTEVPCDDQMLGQCRVTAANEPKYNHMHQSQRLAPQNKPAFLVRDGHRMLAASINTQMI

SEQ ID NO: 249 - protein, 358 aa, Homo sapiens
MAGCGEIDHSINMLPTNRKANESCSNTAPSLTVPECAICLQTCVHPVSLPCKHVFCYLCVKGASWLGKRCALCRQEIPEDFLDKPTLLSPEELKAASRGNGEYAWYYEGRNGWWQYDERTSRELEDAFSKGKKNTEMLIAGFLYVADLENMVQYRRNEHGRRRKIKRDIIDIPKKGVAGLRLDCDANTVNLARESSADGADSVSAQSGASVQPLVSSVRPLTSVDGQLTSPATPSPDASTSLEDSFAHLQLSGDNTAERSHRGEGEEDHESPSSGRVPAPDTSIEETESDASSDSEDVSAVVAQHSLTQQRLLVSNANQTVPDRSDRSGTDRSVAGGGTVSVSVRSRRPDGQCTVTEV

SEQ ID NO: 250 - protein, 489 aa, Homo sapiens
MEEAGICGLGVKADMLCNSQSNDILQHQGSNCGGTSNKHSLEEDEGSDFITENRNLVSPAYCTQESREEIPGGEARTDPPDGQQDSECNRNKEKTLGKEVLLLMQALNTLSTPEEKLAALCKKYADLLEESRSVQKQMKILQKKQAQIVKEKVHLQSEHSKAILARSKLESLCRELQRHNKTLKEENMQQAREEEERRKEATAHFQITLNEIQAQLEQHDIHNAKLRQENIELGEKLKKLIEQYALREEHIDKVFKHKELQQQLVDAKLQQTTQLIKEADEKHQREREFLLKEATESRHKYEQMKQQEVQLKQQLSLYMDKFEEFQTTMAKSNELFTTFRQEMEKMTKKIKKLEKETIIWRTKWENNNKALLQMAEEKTVRDKEYKALQIKLERLEKLCRALQTERNELNEKVEVLKEQVSIKAAIKAANRDLATPVMQPCTALDSHKELNTSSKRALGAHLEAEPKSQRSAVQKPPSTGSAPAIESVD

SEQ ID NO: 251 - protein, 769 aa, Homo sapiens
MRPVSVWQWSPWGLLLCLLCSSCLGSPSPSTGPEKKAGSQGLRFRLAGFPRKPYEGRVEIQRAGEWGTICDDDFTLQAAHILCRELGFTEATGWTHSAKYGPGTGRIWLDNLSCSGTEQSVTECASRGWGNSDCTHDEDAGVICKDQRLPGFSDSNVIEVEHHLQVEEVRIRPAVGWGRRPLPVTEGLVEVRLPDGWSQVCDKGWSAHNSHVVCGMLGFPSEKRVNAAFYRKLRKRAAKVSARHPKPLGRLLAQRQQHSFGLHGVACVGTEAHLSLCSLEFYRANDTARCPGGGPAVVSCVPGPVYAASSGQKKQQQSKPQGEARVRLKGGAHPGEGRVEVLKASTWGTVCDRKWDLHAASVVCRELGFGSAREALSGARMGQGMGAIHLSEVRCSGQELSLWKCPHKNITAEDCSHSQDAGVRCNLPYTGAETRIRLSGGRSQHEGRVEVQIGGPGPLRWGLICGDDWGTLEAMVACRQLGLGYANHGLQETWYWDSGNITEVVMSGVRCTGTELSLDQCAHHGTHITCKRTGTRFTAGVICSETASDLLLHSALVQETAYIEDRPLHMLYCAAEENCLASSARSANWPYGHRRLLRFSSQIHNLGRADFRPKAGRHSWVWHECHGHYHSMDIFTHYDILTPNGTKVAEGHKASFCLEDTECQEDVSKRYECANFGEQGITVGCWDLYRHDIDCQWIDITDVKPGNYILQVVINPNFEVAESDFTNNAMKCNCKYDGHRIWVHNCHIGDAFSEEAHRRFERSPGQTST

SEQ ID NO: 252 - protein, 174 aa, Homo sapiens
MKPPGGESSNLFGSPEEATPSSRPNRMASNIFGPTEEPQNIPKRTNPPGGKGSGIFDESTPVQTRQHLNPPGGKTSDIFGSPVTATSRLAHPNKPKDHVFLCEGEEPKSDLKAARSIPAGAEPGEKGSARKAGPAKEQEPMPTVDSHEPRLGPRARSHNKVLNPPGGKSSISFY

SEQ ID NO: 253 - protein, 131 aa, Homo sapiens
MAPEENAGTELLLQSLERRFLAARALRSLPWQSLEAKLRDSSDSELLRDILQKTCCIAQKPSCRWSGSCGGWLPTRSTSGLLKSMWPLPSATQRRASCSPLSYAGLGSDGKWNLVMTRNCFPTKSTWRWQC

SEQ ID NO: 254 - protein, 59 aa, Homo sapiens [sequence omitted]

SEQ ID NO: 255 - protein, 325 aa, Homo sapiens
MATPLPPPSPRHLRLLRLLLSGLVLGAALRGAAAGHPDVAACPGSLDCALKRRARCPPGAHACGPCLQPFQEDQQGLCVPRMRRPPGGGRPQPRLEDEIDFLAQELARKESGHSTPPLPKDRQRLPEPATLGFSARGQGLELGLPSTPGTPTPTPHTSLGSPVSSDPVHMSPLEPRGGQGDGLALVLILAFCVAGAAALSVASLCWCRLQREIRLTQKADYATAKAPGSPAAPRISPGDQRLAQSAEMYHYQHQRQQMLCLERHKEPPKELDTASSDEENEDGDFTVYECPGLAPTGEMEVRNPLFDHAALSAPLPAPSSPPALP

SEQ ID NO: 256 - protein, 1372 aa, Homo sapiens
MDESTFAGGQEYGGWVPEHHKSNEPKSGHIEKGNTDQCQERTPQPMIYPTGEIESTVNAWMLSHEKEQSQILLISNCLDALKHRSCDYGLKIALDIKHRLKIQPKIFIYTRTHKYAVTLHMLAHTITSERDDIEEWLNAWVVDQCCPPEMSVMMEMFYIYAVHYGRSLLSWSQEEEKEKGGREEEEEEEEEEEEEEEEEEEEEEEEEEEAEEEKLGEAAVPEGVQLGWLTALSLVVNFHPVVLVSPWTWYRPCAILISLDRARAAAQGGSRKGWAEFQARGTERREQCSAALVREMEQRLLCGLLHPRPGCTARIFDLSVARWLAARWGSACPGGAARAPRGALAPGLRQSEAVPAPLPPRVADAAGASGKRSGRRARSCPSPMARAARVAVAAVGPHAGHRTRRLAGRGREGRAALAAGAQLPAIGDARRHLVSRKRPSEMGFDPACGRRVFRRRGCGQAVPPLWFPGLLLAPSWPDGRPGRRAHLKFALLYGEGKFESPEGKYFAKRQARIRGWTQEDPEASGTSSNRARSEPSVLTVAGILQTESRKTAKDICKIRCLCEEKENVLNINCENKGFTTVSLLQPPQYRIYQLFLNGNLLTRLYPNEFVNYSNAVTLHLGNNGLQEIRTGAFSGLKTLKRLHLNNNKLEILREDTFLGLESLEYLQADYNYISAIEAGAFSKLNKLKVLILNDNLLLSLPSNVFRFVLLTHLDLRGNRLKVMPFAGVLEHIGGIMEIQLEENPWNCTCDLLPLKAWLDTITVFVGEIVCETPFRLHGKDVTQLTRQDLCPRKSASDSSQRGSHADTHVQRLSPTMNPALNPTRAPKASRPPKMRNRPTPRVTVSKDRQSFGPIMVYQTKSPVPLTCPSSCVCTSQSSDNGLNVNCQERKFTNISDLQPKPTSPKKLYLTGNYLQTVYKNDLLEYSSLDLLHLGNNRIAVIQEGAFTNLTSLRRLYLNGNYLEVLYPSMFDGLQSLQYLYLEYNVIKEIKPLTFDALINLQLLFLNNNLLRSLPDNIFGGTALTRLNLRNNHFSHLPVKGVLDQLPAFIQIDLQENPWDCTCDIMGLKDWTEHANSPVIINEVTCESPAKHAGEILKFLGREAICPDSPNLSDGTVLSMNHNTDTPRSLSVSPSSYPELHTEVPLSVLILGLLVVFILSVCFGAGLFVFVLKRRKGVPSVPRNTNNLDVSSFQLQYGSYNTETHDKTDGHVYNYIPPPVGQMCQNPIYMQKEGDPVAYYRNLQEFSYSNLEEKKEEPATPAYTISATELLEKQATPREPELLYQNIAERVKELPSAGLVHYNFCTLPKRQFAPSYESRRQNQDRINKTVLYGTPRKCFVGQSKPNHPLLQAKPQSEPDYLEVLEKQTAISQL

SEQ ID NO: 257 - protein, 131 aa, Homo sapiens
MVLSPADKTNVKAAWGKVGAHAGEYGAEALERMFLSFPTTKTYFPHFDLSHGSAQVKGHGKKVADMPNALSALSDLHAHKLRVDPVNFKLLSHCLLVTLAAHLPAEFTPAVHASLDKFLASVSTVLTSKYR

SEQ ID NO: 258 - protein, 406 aa, Homo sapiens
MHPAVFLSLPDLRCSLLLLVTWVFTPVTTEITSLDTENIDEILNNADVALVNFYADWCRFSQMLHPIFEEASDVIKEEFPNENQVVFARVDCDQHSDIAQRYRISKYPTLKLFRNGMMMKREYRGQRSVKALADYIRQQKSDPIQEIRDLAEITTLDRSKRNIIGYFEQKDSDNYRVFERVANILHDDCAFLSAFGDVSKPERYSGDNIIYKPPGHSAPDMVYLGAMTNFDVTYNWIQDKCVPLVREITFENGEELTEEGLPFLILFHMKEDTESLEIFQNEVARQLISEKGTINFLHADCDKFRHPLLHIQKTPADCPVIAIDSFRHMYVFGDFKDVLIPGKLKQFVFDLHSGKLHREFHHGPDPTDTAPGEQAQDVASSPPESSFQKLAPSEYRYTLLRDRDEL

SEQ ID NO: 259 - protein, 246 aa, Homo sapiens
MSRGSSAGFDRHITIFSPEGRLYQVEYAFKAINQGGLTSVAVRGKDCAVIVTQKKVPDKLLDSSTVTHLFKITENIGCVMTGMTADSRSQVQRARYEAANWKYKYGYEIPVDMLCKRIADISQVYTQNAEMRPLGCCMILIGIDEEQGPQVYKCDPAGYYCGFKATAAGVKQTESTSFLEKKVKKKFDWTFEQTVETAITCLSTVLSIDFKPSEIEVGVVTVENPKFRILTEAEIDAHLVALAERD

SEQ ID NO: 260 - protein, 611 aa, Homo sapiens
MNDISQKAEIKEMLASDDEEDVSSKVEKAYVPKLTGTVKGRFAEMEKQRQEEQRKRTEEERKRRIEQDMLEKRKIQRELAKRAEQIEDKNNTGTESASEEGDDSLLITVVPVKSYKTSGKMKKNFEDLEKEREEKERIKYEEDKRIRYEEQRPSLKEAKCLSLVMDDEIESEAKKESLSPGKLKLTFEELERQRQENRKKQAEEEARKRLEEEKRAFEEARRQMVNEDEENQDTAKIFKGYRPGKLKLSFEEMERQRREDEKRKAEEEARRRIEEEKKAFAEARRNMVVDDDSPEMYKTISQEFLTPGKLEINFEELLKQKMEEEKRRTEEERKHKLEMEKQEFEQLRQEMGEEEEENETFGLSREYEELIKLKRSGSIQAKNLKSKFEKIGQLSEKEIQKKIEEERARRRAIDLEIKEREAENFHEEDDVDVRPARKSEAPFTHKVNMKARFEQMAKAREEEEQRRIEEQKLLRMQFEQREIDAALQKKREEEEEEEGSIMNGSTAEDEEQTRSGAPWFKKPLKNTSVVDSEPVRFTVKVTGEPKPEITWWFEGEILQDGEDYQYIERGETYCLYLPETFPEDGGEYMCKAVNNKGSAASTCILTIESKN

SEQ ID NO: 261 - protein, 64 aa, Homo sapiens
MEFHSSPRLECSGTISAHCDLHLLGSSDSPASTSRVVGTTGVCHHAWTVLGFFCIFSGDRVLPS

SEQ ID NO: 262 - protein, 307 aa, Homo sapiens
MSLAAPDANPVVGFLAYSRPSVLPGWHRPHRTSRVGLSGSSTAGPRNSRFGAAPSRLGHTGARCRSPVLRHLVWNFRLAVSSRSGALMKTILSNQTVDIPENGMRLDVFYLHLYCTFQALCGLTSVFSLLVDITLKGRTVIVKGPRGTLRRDFNHINVELSLLGKKKKRLRVDKWWGNRKELATVRTICSHVQNMIKGVTLGFRYKMRSVYAHFPINVVIQENGSLVEIRNFLGEKYIRRVRMRPGVACSVSQAQKDELILEGNDIELVSNSAALIQQATTVKNKDIRKFLDGIYVSEKGTVQQADE

SEQ ID NO: 263 - protein, 219 aa, Homo sapiens
MDIIVLLPKGHCTKIQELQMTTVLKQNVHVFGVEGNSDELDEPIKTVFADVAFVKKHNLMSLNSINWSRVLVQMAHHFFAYFQCTPSLDTHPLPLVEVVVPTGAAGNLAAGYIAQKIGLPIRLVVAVNRNDIIHRTVQQGDFSLSEAVKSTLASAMDIQVPYNMERVFWLLSGSDSQVTRALMEQFERTQSVNLPKELHSKGPSSSPSSGRDRTTKKWL

SEQ ID NO: 264 - protein, 473 aa, Homo sapiens
MRAVSLLVLVLGVTMSYVMPWPQTENYTIYFPGSEAFKLGRAISSLPSIQYPGSSAYRWPVMELLSLYNYARRALMGNLANVIPWGWSEKMTIEYLNPGTGELLNNSRGDAPHSEHVHHRRVPRAGNAAASDCCVGAAAPPGQDRRGGASGVGKTGSRCPLGVGLAVVYATRLLPQTGETRIKNGQAAFWGHRHRRHQNFGVFEPLQCLAQKGELVKLAPLGGLEALVVRFLTKRFIGDYERNAGNLYTRQVQIEGETLALQVQDTPGIQVHENSLSCSEQLNRCIRWADAVVIVFSITDYKSYELISQLHQHVQQLHLGTRLPVVVVANKADLLHIKQVDPQLGLQLASMLGCSFYEVSVSENYNDVYSAFHVLCKEVSHKQQPSSTPEKRRTSLIPRPKSPNMQDLKRRFKQALSAKASYKPLLKQVVEEIFHPERPDSVDIEHMSSGLTDLLKTGFSMFMKSNITVPLIH

SEQ ID NO: 265 - protein, 128 aa, Homo sapiens [sequence omitted]

SEQ ID NO: 266 - protein, 134 aa, Homo sapiens
MPWVPKGRGRARSKFCSPEQPPCGPMAPAGSVQATPPAGSRHPSPRTSVFCLVRTRASCRNAIPILRTNKAKLGSFQMPSHQEEQKQPRVRSSAVKWRGTSKHLPPPPMEVLMDKSFASLESPESSKSTENSTK

SEQ ID NO: 267 - protein, 593 aa, Homo sapiens
MEGAGPRGAGPARRRGAGGPPSPLLPSLLLLLLLWMLPDTVAPQELNPRGRNVCRAPGSQVPTCCAGWRQQGDECGIAVCEGNSTCSENEVCVRPGECRCRHGYFGANCDTSERGVGPVLVGGAESWRDGAGSKVGRGRIRLRGGSPEVAAGVRDAGRFRLAGGTYSSTGAFHPLRSSPAECPRQFWGPDCKELCSCHPHGQCEDVTGQCTCHARRWGARCEHACQCQHGTCHPRSGACRCEPGWWGAQCASACYCSATSRCDPQTGACLCHAGWWGRSCNNQCACNSSPCEQQSGRCQCRERTFGARCDRYCQCFRGRCHPVDGTCACEPGYRGKYCREPCPAGFYGLGCRRRCGQCKGQQPCTVAEGRCLTCEPGWNGTKCDQPCATGFYGEGCSHRCPPCRDGHACNHVTGKCTRCNAGWIGDRCETKCSNGTYGEDCAFVCADCGSGHCDFQSGRCLCSPGVHGPHCNVTCPPGLHGADCAQACSCHEDTCDPVTGACHLETNQRKGVMGAGALLVLLVCLLLSLLGCCCACRGKDPTRRPRPAGSFAWEEEGAAPTMRALQSHQHEAAPDPAPEAETTQSRSGPPRPG

SEQ ID NO: 268 - protein, 858 aa, Homo sapiens
MEKMSRVTTALGGSVLTGRTMHCHLDAPANAISVCRDAAQVVVAGRSIFKIYAIEEEQFVEKLNLRVGRKPSLNLSCADVVWHQMDENLLATAATNGVVVTWNLGRPSRNKQDQLFTEHKRTVNKVCFHPTEAHVLLSGSQDGFMKCFDLRRKDSVSTFSGEATEAGPREWAMAGCVPILPVLSCRILRLHHSFAHGPMQDAESTANDARESWGCPLYPLGLCSGPQAGQSESVRDVQFSIRDYFTFASTFENGNVQLWDIRRPDRCERMFTAHNGPVFCCDWHPEDRGWLATGGRDKMVKVWDMTTHRAKEMHCVQTIASVARVKWRPECRHHLATCSMMGDHNIYVWDVRRPFVPAAMFEEHRDVTTGIAWRHPHDPSFLLSGSKDSSLCQHLFRDASQPVERANPEGLCYGLFGDLAFAAKESLVAAESGRKPYTGDRRHPIFFKRKLDPAEPFAGLASSALSVFETEPGGGGMRWFVDTAERYALAGRPLAELCDHNAKVARELGRNQVAQTWTMLRIIYCSPGLVPTANLNHSVGKGGSCGLPLMNSFNLKDMAPGLGSETRLDRSKGDARSDTVLLDSSATLITNEDNEETEGSDVPADYLLGDVEGEEDELYLLDPEHAHPEDPECVLPQEAFPLRHEIVDTPPGPEHLQDKADSPHVSGSEADVASLAPVDSSFSLLSVSHALYDSRLPPDFFGVLVRDMLHFYAEQGDVQMAVSVLIVLGERVRKDIDEQTQEHWYTSYIDLLQRFRLWNVSNEVVKLSTSRAVSCLNQASTTLHVNCSHCKRPMSSRGWVCDRCHRCASMCAVCHHVVKGLFVWCQGCSHGGHLQHIMKWLEGSSHCPAGCGHLCEYS

SEQ ID NO: 269 - protein, 790 aa, Homo sapiens
MEKMSRVTTALGGSVLTGRTMHCHLDAPANAISVCRDAAQVVVAGRSIFKIYAIEEEQFVEKLNLRVGRKPSLNLSCADVVWHQMDENLLATAATNGVVVTWNLGRPSRNKQDQLFTEHKRTVNKVCFHPTEAHVLLSGSQDGFMKCFDLRRKDSVSTFSGQSESVRDVQFSIRDYFTFASTFENGNVQLWDIRRPDRCERMFTAHNGPVFCCDWHPEDRGWLATGGRDKMVKVWDMTTHRAKEMHCVQTIASVARVKWRPECRHHLATCSMMGDHNIYVWDVRRPFVPAAMFEEHRDVTTGIAWRHPHDPSFLLSGSKDSSLCQHLFRDASQPVERANPEGLCYGLFGDLAFAAKESLVAAESGRKPYTGDRRHPIFFKRKLDPAEPFAGLASSALSVFETEPGGGGMRWFVDTAERYALAGRPLAELCDHNAKVARELGRNQVAQTWTMLRIIYCSPGLVPTANLNHSVGKGGSCGLPLMNSFNLKDMAPGLGSETRLDRSKGDARSDTVLLDSSATLITNEDNEETEGSDVPADYLLGDVEGEEDELYLLDPEHAHPEDPECVLPQEAFPLRHEIVDTPPGPEHLQDKADSPHVSGSEADVASLAPVDSSFSLLSVSHALYDSRLPPDFFGVLVRDMLHFYAEQGDVQMAVSVLIVLGERVRKDIDEQTQEHWYTSYIDLLQRFRLWNVSNEVVKLSTSRAVSCLNQASTTLHVNCSHCKRPMSSRGWVCDRCHRCASMCAVCHHVVKGLFVWCQGCSHGGHLQHIMKWLEGSSHCPAGCGHLCEYS

SEQ ID NO: 270 - protein, 1190 aa, Homo sapiens
MEVDTEEKRHRTRSKGVRVPVEPAIQELFSCPTPGCDGSGHVSGKYARHRSVYGCPLAKKRKTQDKQPQEPAPKRKPFAVKADSSSVDECDDSDGTEDMDEKEEDEGEEYSEDNDEPGDEDEEDEEGDREEEEEIEEEDEDDDEDGEDVEDEEEEEEEEEEEEEEEENEDHQMNCHNTRIMQDTEKDDNNNDEYDNYDELVAKSLLNLGKIAEDAAYRARTESEMNSNTSNSLEDDSDKNENLGRKSELSLDLDSDVVRETVDSLKLLAQGHGVVLSENMNDRNYADSMSQQDSRNMNYVMLGKPMNNGLMEKMVEESDEEVCLSSLECLRNQCFDLARKLSETNPQERNPQQNMNIRQHVRPEEDFPGRTPDRNYSDMLNLMRLEEQLSPRSRVFASCAKEDGCHERDDDTTSVNSDRSEEVFDMTKGNLTLLEKAIALETERAKAMREKMAMEAGRRDNMRSYEDQSPRQLPGEDRKPKSSDSHVKKPYYDPSRTEKKESKCPTPGCDGTGHVTGLYPHHRSLSGCPHKDRVPPEILAMHESVLKCPTPGCTGRGHVNSNRNSHRSLSGCPIAAAEKLAKAQEKHQSCDVSKSSQASDRVLRPMCFVKQLEIPQYGYRNNVPTTTPRSNLAKELEKYSKTSFEYNSYDNHTYGKRAIAPKVQTRDISPKGYDDAKRYCKDPSPSSSSTSSYAPSSSSNLSCGGGSSASSTCSKSSFDYTHDMEAAHMAATAILNLSTRCREMPQNLSTKPQDLCATRNPDMEVDENGTLDLSMNKQRPRDSCCPILTPLEPMSPQQQAVMNNRCFQLGEGDCWDLPVDYTKMKPRRIDEDESKDITPEDLDPFQEALEERRYPGEVTIPSPKPKYPQCKESKKDLITLSGCPLADKSIRSMLATSSQELKCPTPGCDGSGHITGNYASHRSLSGCPRAKKSGIRIAQSKEDKEDQEPIRCPVPGCDGQGHITGKYASHRSASGCPLAAKRQKDGYLNGSQFSWKSVKTEGMSCPTPGCDGSGHVSGSFLTHRSLSGCPRATSAMKKAKLSGEQMLTIKQRASNGIENDEEIKQLDEEIKELNESNSQMEADMIKLRTQITTMESNLKTIEEENKVIEQQNESLLHELANLSQSLIHSLANIQLPHMDPINEQNFDAYVTTLTEMYTNQDRYQSPENKALLENIKQAVRGIQFRSEQLL

SEQ ID NO: 271 - protein, 712 aa, Homo sapiens
MEGSGTGKRRGKAAKTSLRIMDARAQLLLRVPHPGPSLTSGALTHIRDPHPGLSPTSGTLMPGRRRGGPHSGPCTPSPEVPPRSAGLGAVYSGPGEAVVAPSASVAVMEEIPAQEAAGSPRVQFQSLETQSECLSPEPQFVQDTDMERGLTGAPPVPQVPALPREGSPGDQAAALLTARYQSSQDVLFQEFVTFEDVAVHLTREEWGYLDPVQRDLYREVMLENYGNVVSLGFPISKPDGISQLEQDLQVFDLETKTREVLRDDCSDGETREENKLLIPKQKISEEVHSYKVRVGRLKHDITQVPETREVYKSEDRLERLQEILRKFLYLEREFRQITISKETFTSEKNNECHEPEKSFSLDSTIDADQRVLRIQNTDDNDKYDMSFNQNSASGKHEHLNLTEDFQSSECKESLMDLSHLNKWESIPNTEKSYKCDVCGKIFHQSSALTRHQRIHTREKPYKCKECEKSFSQSSSLSRHKRIHTREKPYKCEASDKSCEASDKSCSPSSGIIQHKKIHTRAKSYKCSSCERVFSRSVHLTQHQKIHKEMPCKCTVCGSDFCHTSYLLEHQRVHHEEKAYEYDEYGLAYIKQQGIHFREKPYTCSECGKDFRLNSHLIQHQRIHTGEKAHECNECGKAFSQTSCLIQHHKMHRKEKSYECNEYEGSFSHSSDLILQQEVLTRQKAFDCDVWEKNSSQRAHLVQHQSIHTKENS

SEQ ID NO: 272 - protein, 101 aa, Homo sapiens
MLWDLNEGKHLYTLDGGDIINALCFSPNRYWLCAATGPSIKIWDLEGKIIVDELKQEVISTSSKAEPPQCTSLAWSADGQTLFAGYTDNLVRVWQVTIGTR

SEQ ID NO: 273 - protein, 374 aa, Homo sapiens
MSRVPSPPPPAEMSSGPVAESWCYTQIKVVKFSYMWTINNFSFCREEMGEVIKSSTFSSGANDKLKWCLRVNPKGLDEESKDYLSLYLLLVSCPKSEVRAKFKFSILNAKGEETKAMESQRAYRFVQGKDWGFKKFIRRDFLLDEANGLLPDDKLTLFCEVSVVQDSVNISGQNTMNMVKVPECRLADELGGLWENSRFTDCCLCVAGQEFQAHKAILAARSPVFSAMFEHEMEESKKNRVEINDVEPEVFKEMMCFIYTGKAPNLDKMADDLLAAADKYALERLKVMCEDALCSNLSVENAAEILILADLHSADQLKTQAVDFINYHASDVLETSGWKSMVVSHPHLVAEAYRSLASAQCPFLGPPRKRLKQS

SEQ ID NO: 274 - protein, 470 aa, Homo sapiens
MAPVVTGKFGERPPPKRLTREAMRNYLKERGDQTVLILHAKVAQKSYGNEKRFFCPPPCVYLMGSGWKKKKEQMERDGCSEQESQPCAFIGIGNSDQEMQQLNLEGKNYCTAKTLYISDSDKRKHFMLSVKMFYGNSDDIGVFLSKRIKVISKPSKKKQSLKNADLCIASGTKVALFNRLRSQTVSTRYLHVEGVDDDESEGEEFTVRDGYIHYGQTVKLVCSVTGMALPRLIIRKVDKQTALLDADDPVSQLHKCAFYLKDTERMYLCLSQERIIQFQATPCPKEPNKEMINDGASWTIISTDKAEYTFYEGMGPVLAPVTPVPVVESLQLNGGGDVAMLELTGQNFTPNLRVWFGDVEAETMYRCGESMLCVVPDISAFREGWRWVRQPVQVPVTLVRNDGIIYSTSLTFTYTPEPGPRPHCSAAGAILRANSSQVPPNESNTNSEGSYTNASTNSTSVTSSTATVVS

SEQ ID NO: 275 - protein, 144 aa, Homo sapiens
MRKIDLCLSSEGSEVILATSSDEKHPPENIIDGNPETFWTTTGMFPQEFIICFHKHVRIERLVIQSYFVQTLKIEKSTSKEPVDFEQWIEKDLVHTEGQLQNEEIVAHDGSATYLRFIIVSAFDHFASVHSVSAEGTVVSNLSS

SEQ ID NO: 276 - protein, 121 aa, Homo sapiens
MRKIDLCLSSEGSEVILATSSDEKHPPENIIDGNPETFWTTTGMFPQEFIICFHKHVRIERLVIQSYFDLVHTEGQLQNEEIVAHDGSATYLRFIIVSAFDHFASVHSVSAEGTVVSNLSS

SEQ ID NO: 277 - protein, 83 aa, Homo sapiens
MLRNLLALRQIGQRTISTASRRHFKNKVPEKQKLFQEDDEIPLYLKGGVADALLYRATMILTVGGTAYAIYELAVASFPKKQE

SEQ ID NO: 278 - protein, 157 aa, Homo sapiens
MCVAQVLTAHLLPPRQALGSLCSPWAAPRVGPLPPAPAMVRISKPKTFQAYLDDCHRRYSCAHCRAHLANHDDLISKSFQGSQGRAYLFNSVVNVGCGPAEERVLLTGLHAVADIHCENCKTTLGWKYEQAFESSQKYKEGKYIIELNHMIKDNGWD

SEQ ID NO: 279 - protein, 282 aa, Homo sapiens
MARRGWAQTGWGCGQAWGASGGGRSCEELTAVLTPPQLLGRRFNFFIQQKCGFRKAPRKVEPRRSDPGTSGEAYKRSALIPPVEETVFYPSPYPIRSLIKPLFFTVGINKWWNNLSDGQRTVTGIIAANVLVFCLWRVPSLQRTMIRYFTSNPASSVISNFVSYVGKVATGRYGPSLGASGAIMTVLAAVCTKIPEGRLAIIFLPMFTFTAGNALKAIIAMDTAGMILGWKFFDHAAHLGGALFGIWYVTYGHELIWKNREPLVKIWHEIRTNGPKKGGGSK

SEQ ID NO: 280 - protein, 200 aa, Homo sapiens
MATKAVCVLKGDGPVQGIINFEQKARAGTEACLRGRSHPLVPPRTFVRSGSPARPRGRPGPAPGPGPCRPESNGPVKVWGSIKGLTEGLHGFHVHEFGDNTAGCTSAGPHFNPLSRKHGGPKDEERHVGDLGNVTADKDGVADVSIEDSVISLSGDHCIIGRTLVVHEKADDLGKGGNEESTKTGNAGSRLACGVIGIAQ

SEQ ID NO: 281 - protein, 245 aa, Homo sapiens
MAGLELLSDQGYRVDGRRAGELRKIQARMGVFAQADGSAYIEQGNTKALAVVYGPHEIRGSRARALPDRALVNCQYSSATFSTGERKRRPHGDRKSCEMGLQLRQTFEAAILTQLHPRSQIDIYVQVLQADGGTYAACVNAATLAVLDAGIPMRDFVCACSAGFVDGTALADLSHVEEAAGGPQLALALLPASGQIALLEMDARLHEDHLERVLEAAAQAARDVHTLLDRVVRQHVREASILLGD

SEQ ID NO: 282 - protein, 1066 aa, Homo sapiens
MACWRADVCCVLFRQHSPFNVLWTSSCLYVLPPMCSSRRPAALNFIKDNSRALIQRMGMTIIKQITDDLFVWNVLNREEVNIICCEKVEQDAARGIIHMILKKGSESCNLFLKSLKEWNYPLFQDLNGQSLFHQTSEGDLDDLAQDLKDLYHTPSFLNFYPLGEDIDIIFNLKSTFTEPVLWRKDQHHHRVEQLTLNGLLQALQSPCIIEGESGKGKSTLLQRIAMLWGSGKCKALTKFKFVFFLRLSRAQGGLFETLCDQLLDIPGTIRKQTFMAMLLKLRQRVLFLLDGYNEFKPQNCPEIEALIKENHRFKNMVIVTTTTECLRHIRQFGALTAEVGDMTEDSAQALIREVLIKELAEGLLLQIQKSRCLRNLMKTPLFVVITCAIQMGESEFHSHTQTTLFHTFYDLLIQKNKHKHKGVAASDFIRSLDHCGDLALEGVFSHKFDFELQDVSSVNEDVLLTTGLLCKYTAQRFKPKYKFFHKSFQEYTAGRRLSSLLTSHEPEEVTKGNGYLQKMVSISDITSTYSSLLRYTCGSSVEATRAVMKHLAAVYQHGCLLGLSIAKRPLWRQESLQSVKNTTEQEILKAININSFVECGIHLYQESTSKSALSQEFEAFFQGKSLYINSGNIPDYLFDFFEHLPNCASALDFIKLGFYGGAMASWEKAAEDTGGIHMEEAPETYIPSRAVSLFFNWKQEFRTLEVTLRDFSKLNKQDIRYLGKIFSSATSLRLQIKRCAGVAGSLSLVLSTCKNIYSLMVEASPLTIEDERHITSVTNLKTLSIHDLQNQRLPGGLTDSLGNLKNLTKLIMDNIKMNEEDAIKLAEGLKNLKKMCLFHLTHLSDIGEGMDYIVKSLSSEPCDLEEIQLVSCCLSANAVKILAQNLHNLVKLSILDLSENYLEKDGNEALHELIDRMNVLEQLTALMLPWGCDVQGSLSSLLKHLEEVPQLVKLGLKNWRLTDTEIRILGAFFGKNPLKNFQQLNLAGNRVSSDGWLAFMGVFENLKQLVFFDFSTKEFLPDPALVRKLSQVLSKLTFLQEARLVGWQFDDDDLSVITGAFKLVTA

SEQ ID NO: 283 - protein, 92 aa, Homo sapiens [sequence omitted]

SEQ ID NO: 284 - protein, 813 aa, Homo sapiens
MRRDPTPPRGLPRQRPTPSPRTRSRGHQSQRPKAKSEPQPAPAATPGGRRAWEPRAQAGCPPPPRAASPRRLVQGERPESGNRSRQAAYPRRASRARTCTTRLPPTLRQRALTQRPCSVPRTNRKLRRGPGPITLRRPESCSRPAFATEAHDAQALPRPPGVIARQSAMHRALAALKNKPLNHVHKVVKERLCPWLCSRQPEPFGVKFHHAHCKKFHSKNGNDLHPLGGPVFSQVSDCDRLEQNVKNEESQMFYRRLSNLTSSEEVLSFISTMETLPDTMAAGALQRICEVEKKDGDQGLPKEILENSIFQALCFQFEKEPSQLSNTSLVTALQALILLHVDPQSSLLLNLVAECQNRLRKGGMEVRNLCILGESLITLHSSGCVTLELIINQLQGEKLETFTPEDIVALYRILQACTEKVDEHQTFLNKINNFSLSIVSNLSPKLISQMLTALVVLDQSQAFPLIIKLGKYVVRHVPHFTNEELRRVLEAFIYFGHHDTFFTKALEHRVAAVCLTLDPEVVCRVMEYCSRELILSKPILNAVAETFVCQTEKFSPRQISALMEPFGKLNYLPPNASALFRKLENVLFTHFNYFPPKSLLKLLHSCSLNECHPVNFLAKIFKPLFLQRLQGKESHLDTLSRAQLTQLFLASVLECPFYKGPKLLPKYQVKSFLTPCCSLETPVDSQLYRYVKIGLTNLLGARLYFAPKVLTPYCYTIDVEIKLDEEGFVLPSTANEDIHKRIALCIDGPKRFCSNSKHLLGKEAIKQRHLQLLGYQVVQIPYHEIGMLKSRRELVEYLQRKLFSQNTVHWLQE

SEQ ID NO: 285 - protein, 52 aa, Homo sapiens
MKAYCERQGLSMRQIRFRFDGQPINETDTPAQLEMEDEDTIDVFQQQTGGVY

SEQ ID NO: 286 - protein, 402 aa, Homo sapiens
MASIIARVGNSRRLNAPLPPWAHSMLRSLGRSLGPIMASMADRNMKLFSGRVVPAQGEETFENWLTQVNGVLPDWNMSEEEKLKRLMKTLRGPAREVMRVLQATNPNLSVADFLRAMKLVFGESESSVTAHGKFFNTLQAQGEKASLYVIRLEVQLQNAIQAGIIAEKDANRTRLQQLLLGGELSRDLRLRLKDFLRMYANEQERLPNFLELIRMVREEEDWDDAFIKRKRPKRSESMVERAVSPVAFQGSPPIVIGSADCNVIEIDDTLDDSDEDVILVESQDPPLPSWGAPPLRDRARPQDEVLVIDSPHNSRAQFPSTSGGSGYKNNGPGEMRRARKRKHTIRCSYCGEEGHSKETCDNESDKAQVFENLIITLQELTHTEMERSRVAPGEYNDFSEPL

SEQ ID NO: 287 - protein, 538 aa, Homo sapiens
MAYLSECRLRLEKGFILDGVAVSTAARAYGRSRPKLWSAIPPYNAQEDYHARSYFQSHVVPPLLRKTDQSLRTLVDCVFSMGNASDYAWLASHTTPRGMGKPRGHSLQQVTGHDHYNADLKPIDGFNGRESGTSGNVATRSSQNETSTAKASTAEPGPLQNLQVTPTSQSATEPCTSSFRDADAMCERLLEENLAIVEDILPSHACLGYGRNLKKSWHPQTLRNVEKVWKAEQKHEAERKKIEELQRELREERAREEMQRYAEDVGAVKKKEEKLDWMYQGPGGMVNRDEYLLGRPIDKYVFEKMEEKEAGCSSETGLLPGSIFAPSGANSLLDMASKIREDPLFIIRKKEEEKKREVLNNPVKMKKIKELLQMSLEKKEKKKKKEKKKKHKKHKHRSSSSDRSSSEDEHSAGRHNSKVNRRETGQTRSPSPKKEVYQRRHAPGYTRKLSAEELERKRQEMMENAKWREEERLNILKRHAKDEEREQRLEKLDSRDGKFIHRMKLESASTSSLEDRVKRNIYSLQRTSVALEKNFMKR

SEQ ID NO: 288 - protein, 414 aa, Homo sapiens
MAYLSECRLRLEKGFILDGVAVSTAARAYGRSRPKLWSAIPPYNAQEDYHARSYFQSHVVPPLLRKTDQSLRTLVDCVFSMGNASDYAWLASHTTPRGMGKPRGHSLQQVTGHDHYNADLKPIDGFNGRESGTSGNVATRSSQNETSTAKASTAEPGPLQNLQVTPTSQSATEPCTSSFRDADAMCERLLEENLAIVEDILPSHACLGYGRNLKKSWHPQTLRNVEKVWKAEQKHEAERKKIEELQRELREERAREEMQRYAEDVGAVKKKEEKLDWMYQGPGGMVNRDEYLLGRPIDKYVFEKMEEKEAGCSSETGLLPGSIFAPSGANSLLDMASKIREDPLFIIRKKEEEKKREVLNNPVKMKKIKELLQMSLEKKEKKKKKEKKKKHKKHKHRSSSSDRSSSEDEHSAQL

SEQ ID NO: 289 - protein, 549 aa, Homo sapiens
MNKRGKYTTLNLEEKMKVLSRIEAGRSLKSVMDEFGISKSTFYDIKKNKKLILDFVLKQDMPLVGAEKRKRTTGAKYGDVDDAVYMWYQQKRSAGVPVRGVELQAAAERFARCFGRTDFKASTGWLFRFRNRHAIGNRKGCGEQVLSSVSENVEPFRQKLSMIIKEEKLCLAQLYSGDETDLFWKSMPENSQASRKDICLPGKKINKERLSAFLCANADGTHKLKSIIIGKSKLPKSVKEDTSTLPVIYKPSKDVWFTRELFSEWFFQNFVPEVRHFQLNVLRFHDEDVRALLLLDSCPAHPSSESLTSEDGRIKCMFFPHNTSTLIQPMNQGVILSCKRLYRWKQLEESLVIFEESDDEQEKGDKGVSKIKIYNIKSAIFNWAKSWEEVKQITIANAWENLLYKKEPEYDFQGLEHGDYREILEKCGELETKLDDDRVWLNGDEEKGCLLKTKGGITKEVVQKGGEAEKQTAEFKLSAVRESLDYLLDFVDATPEFQRFHFTLKEMQQEIVKKQFQSKIHSRIGSFLKPRPHNIKDSFSGPSTSGSNH

SEQ ID NO: 290 - protein, 299 aa, Homo sapiens
MGHVSSDDGHSDEDELRKSLSELVDDKFGTGTKKVTRILDGGNPFLDVPQALSATTYKHGVLTRKTHADMDGKRTPRGRRGWKKFYAVLKGTILYLQKVRDCPRDLTHPGASDYSKKSNVLKLKTADWRVFLFQAPSKEEMLSWILRINLVAAIFSAPAFPAAVSSMKKFCRPLLPSCTTRLCQEEQLRSHENKLRQLTAELAEHRCHPVERGIKSKEAEEYRLKEHYLTFEKSRYETYIHLLAMKIKVGSDDLERIEARLATLEGDDPSLRKTHSSPALSQGHVTGSKTTKDATGPDT

SEQ ID NO: 291 - protein, 213 aa, Homo sapiens
MEAIWLYQFRLIVIGDSTVGKSCLIRRFTEGRFAQVSDPTVGVDFFSRLVEIEPGKRIKLQIWDTAGQERFRSITRAYYRNSVGGLLLFDITNRRSFQNVHEWLEETKVHVQPYQIVFVLVGHKCDLDTQRQVTRHEAEKLAAAYGMKYIETSARDAINVEKAFTDLTRDIYELVKRGEITIQEGWEGVKSGFVPNVVHSSEEVVKSERRCLC

SEQ ID NO: 292 - protein, 142 aa, Homo sapiens
MATKIDKEACRAAYNLVRDDGSAVIWVTFKYDGSTIVPGEQGAEYQHFIQQCTDDVRLFAFVRFTTGDAMSKRSKFALITWIGENVSGLQRAKTGTDKTLVKEVVQNFAKEFVISDRKELEEDFIKSELKKAGGANYDAQTE

SEQ ID NO: 293 - protein, 442 aa, Homo sapiens
MKEEKEHRPKEKRVTLLTPAGATGSGGGTSGDSSKGEDKQDRNKEKKEALSKVPGRPLARERAGRVRSAGRMAGNGAAPFLSQVLLLSLRLNGSRIILVHPFTRNGESPSRPNPGWGLYPHMYARAYINFKNQEDIILFRDRFDGYVFLDNKAKKTTPLLSFLKNKQRMREEKREERRRREIERKRQREEERRKWKEEEKRKRKDIEKLKKIDRIPERDKLKDEPKIKVHRFLLQAVNQKNLLKKPEKGDEKELDKREKAKKLDKENLSDERASGQSCTLPKRSDSELKDEKPKRPEDESGRDYREREREYERDQERILRERERLKRQEEERRRQKERYEKEKTFKRKEEEMKKEKDTLRDKGKKAESTESIGSSEKTEKKEEVVKRDRIRNKDRPAMQLYQPGARSRNRLCPPDDSTKSGDSAAERKQESGISHRKEGGEE

SEQ ID NO: 294 - protein, 276 aa, Homo sapiens [sequence omitted]

SEQ ID NO: 295 - protein, 975 aa, Homo sapiens
MSGIGNKRAAGEPVTSMPPEKKAAVEDSGTTVETIKLGGVSSTEELDIRTLQTKNRKLAEMLDQRQAIEDELREHIEKLERRQATDDASLLIVNRYWSQFDENIRIILKRYDLEQGLGDLLTERKALVVPEPEPDSDSNQERKDDRERGEGQEPAFSFLATLASSSSEEMESQLQERVESSRRAVSQIVTVYDKLQEKVELLSRKLNSGDNLIVEEAVQELNSFLAQENMRLQELTDLLQEKHRTMSQEFSKLQSKVETAESRVSVLESMIDDLQWDIDKIRKREQRLNRHLAEVLERVNSKGYKVYGAGSSLYGGTITINARKFEEMNAELEENKELAQNRLCELEKLRQDFEEVTTQNEKLKVELRSAVEQVVKETPEYRCMQSQFSVLYNESLQLKAHLDEARTLLHGTRGTHQHQVELIERDEVSLHKKLRTEVIQLEDTLAQVRKEYEMLRIEFEQTLAANEQAGPINREMRHLISSLQNHNHQLKGEVLRYKRKLREAQSDLNKTRLRSGSALLQSQSSTEDPKDEPAELKPDSEDLSSQSSASKASQEDANEIKSKRDEEERERERREKEREREREREKEKEREREKQKLKESEKERDSAKDKEKGKHDDGRKKEAEIIKQLKIELKKAQESQKEMKLLLDMYRSAPKEQRDKVQLMAAEKKSKAELEDLRQRLKDLEDKEKKENKKMADEDALRKIRAVEEQIEYLQKKLAMAKQEEEALLSEMDVTGQAFEDMQEQNIRLMQQLREKDDANFKLMSERIKSNQIHKLLKEEKEELADQVLTLKTQVDAQLQVVRKLEEKEHLLQSNIGTGEKELGLRTQALEMNKRKAMEAAQLADDLKAQLELAQKKLHDFQDEIVENSVTKEKDMFNFKRAQEDISRLRRKLETTKKPDNVPKCDEILMEEIKDYKARLTCPCCNMRKKDAVLTKCFHVFCFECVKTRYDTRQRKCPKCNAAFGANDFHRIYIG

SEQ ID NO: 296 - protein, 91 aa, Homo sapiens
MRSLLSVGLPPIPIGRGCHFTLITVFLYCTRVGRKGTCVAPPDLPVSASTFGTSCLRQEAAAEGRPVVRFDKIKAAGKWTVRFREVEGSWI

SEQ ID NO: 297 - protein, 134 aa, Homo sapiens
MVENSPSPLPERAIYGFVLFLSSQFGFILYLVWAFIPESWLNSLGLTYWPQKYWAVALPVYLLIAIVIGYVLLFGINMMSTSPLDSIHTITDNYAKNQQQKKYQEEAIPALRDISISEVNQMFFLAAKELYTKN

SEQ ID NO: 298 - protein, 453 aa, Homo sapiens
MEDYLQGCRAALQESRPLHVVLGNEACDLDSTVSALALAFYLAKTTEAEEVFVPVLNIKRSELPLRGDIVFFLQKVHIPESILIFRDEIDLHALYQAGQLTLILVDHHILSKSDTALEEAVAEVLDHRPIEPKHCPPCHVSVELVGSCATLVTERILQGAPEILDRQTAALLHGTIILDCVNMDLKIGKATPKDSKYVEKLEALFPDLPKRNDIFDSLQKAKFDVSGLTTEQMLRKDQKTIYRQGVKVAISAIYMDLEAFLQRSNLLADLHAFCQAHSYDVLVAMTIFFNTHNEPVRQLAIFCPHVALQTTICEVLERSHSPPLKLTPASSTHPNLHAYLQGNTQVSRKKLLPLLQEALSAYFDSMKIPSGQPETADVSREQVDKELDRASNSLISGLSQDEEDPPLPPTPMNSLVDECPLDQGLPKLSAEAVFEKCSQISLSQSTTASLSKK

SEQ ID NO: 299 - protein, 125 aa, Homo sapiens
MDDVESSEEEEEEDEKLERVPSPDHRRRSYRDLDKPRRSPTLRYRRSRSRSPRRRSRSPKRRSPSPRRERHRSKSPRRHRSRSRDRRHRSRSKSPGHHRSHRHRSHSKSPERSKKSHKKSRRGNE

SEQ ID NO: 300 - protein, 274 aa, Homo sapiens
MPRAEPRATLGEQEKAGLPLGAWRLYLLRHFRKQTELRRSGSRDVTGALLVAAAVASEAVGSLRVAEGGPNTLLLQVLRSWPWCNKELKTMEERKVKRRSPKSFSAHCTQVVNAKKNAIPVSKSTGFSNPASQSTSQRPKLKRVMKEKTKPQGGEGKGAQSTPIQHSFLTDVSDVQEMERGLLSLLNDFHSGKLQAFGNECSIEQMEHVRGMQEKLARLNLELYGELEELPEDKRKTASDSNLDRLLSDLEELNSSIQKLHLADAQDVPNTSAS

SEQ ID NO: 301 - protein, 290 aa, Homo sapiens
MSNKEGSGGFRKRKHDNFPHNQRREGKDVNSSSPVMLAFKSFQQELDARHDKYERLVKLSRDITVESKRTIFLLHRITSAPDMEDILTESEIKLDGVRQKIFQVAQELSGEDMHQFHRAITTGLQEYVEAVSFQHFIKTRSLISMDEINKQLIFTTEDNGKENKTPSSDAQDKQFGTWRLRVTPVDYLLGVADLTGELMRMCINSVGNGDIDTPFEVSQFLRQVYDGFSFIGNTGPYEVSKKLYTLKQSLAKVENACYALKVRGSEIPKHMLADVFSVKTEMIDQEEGIS

SEQ ID NO: 302 - protein, 208 aa, Homo sapiens [sequence omitted]

SEQ ID NO: 303 - protein, 101 aa, Homo sapiens
MVCEKCEKKLGTVITPDTWKDGARNTTESGGRKLNENKALTSKKARFDPYGKNKFSTCRICKSSVHQPGSHYCQGCAYKKGICAMCGKKVLDTKNYKQTSV

SEQ ID NO: 304 - protein, 387 aa, Homo sapiens
MAGSEPRSGTNSPPPPFSDWGRLEAAILSGWKTFWQSVSKERVARTTSREEVDEAASTLTRLPIDVQLYILSFLSPHDLCQLGSTNHYWNETVRDPILWRYFLLRDLPSWSSVDWKSLPDLEILKKPISEVTDGAFFDYMAVYRMCCPYTRRASKSSRPMYGAVTSFLHSLIIQNEPRFAMFGPGLEELNTSLVLSLMSSEELCPTAGLPQRQIDGIGSGVNFQLNNQHKFNILILYSTTRKERDRAREEHTSAVNKMFSRHNEGDDQQGSRYSVIPQIQKVCEVVDGFIYVANAEAHKRHEWQDEFSHIMAMTDPAFGSSGRPLLVLSCISQGDVKRMPCFYLAHELHLNLLNHPWLVQDTEAETLTGFLNGIEWILEEVESKRAR

SEQ ID NO: 305 - protein, 155 aa, Homo sapiens
MLKAKILFVGPCESGKTVLANFLTESSDITEYSPTQGVRFESCWPALMKDAHGVVIVFNADIPSHRKEMEMWYSCFVQQPSLQDTQCMLIAHHKPGSGDDKGSLSLSPPLNKLKLVHSNLEDDPEEIRMEFIKYLKSIINSMSESRDREEMSIMT

SEQ ID NO: 306 - protein, 145 aa, Homo sapiens
MCQTTAAGEGAHAADEGYTQRVVGARRGTPQRYTGGAETKNRAFRSYPKMETSWPRGGGSTPPVALDAQVERECALGSGAQGKHSCLAVRVVLIFCINEHYPQTLTYRLPFVLPLRSGGTPTSWRALFFPSSSDSNCKLCGGTSS

SEQ ID NO: 307 - protein, 167 aa, Homo sapiens
MVVGRSSFPMQYFPINNTSLPQEYFLFQKMQWHVYNPVLQLPYYEMTAPLPNSASVSSSLNHVPDLEAGPSSYKWTHQQPSDSDLYQMTAPLPNSASVSSSLNHVPDLEAGPSSYKWTRQQPSDSDLYQMNKRKRQKQTSDSDSSTDNNRGNECSQKFRKSKKKKRY

SEQ ID NO: 308 - protein, 375 aa, Homo sapiens
MSASAPAAEGEGTPTQPASEKEPEMPGPREESEEEEDEDDEEEEEEEKEKSLIVEGKREKKKVERLTMQVSSLQREPFTIAQGKGQKLCEIERIHFFLSKKKTDELRNLHKLLYNRPGTVSSLKKNVGQFSGFPFEKGSVQYKKKEEMLKKFRNAMLKSICEVLDLERSGVNSELVKRILNFLMHPKPSGKPLPKSKKTCSKGSKKERNSSGMARKAKRTKCPEILSDESSSDEDEKKNKEESSDDEDKESEEEPPKKTAKREKPKQKATSKSKKSVKSANVKKADSSTTKKNQNSSKKESESEDSSDDEPLIKKLKKPPTDEELKETIKKLLASANLEEVTMKQICKKVYENYPTYDLTERKDFIKTTVKELIS

SEQ ID NO: 309 - protein, 289 aa, Homo sapiens
MAALAYNLGKREINHYFSVRSAKVLALVAVLLLAACHLASRRYRGNDSCEYLLSSGRFLGEKVWQPHSCMMHKYKISEAKNCLVDKHIAFIGDSRIRQLFYSFVKIINPQFKEEGNKHENIPFEDKTASVKVDFLWHPEVNGSMKQCIKVWTEDSIAKPHVIVAGAATWSIKIHNGSSEALSQYKMNITSIAPLLEKLAKTSDVYWVLQDPVYEDLLSENRKMITNEKIDAYNEAAVSILNSSTRNSKSNVKMFSVSKLIAQETIMESLDGLHLPESSRETVRNFYICQ

SEQ ID NO: 310 - protein, 274 aa, Homo sapiens
MAALAYNLGKREINHYFSVRSAKVLALVAVLLLAACHLASRRYRGNDSCEYLLSSGRFLGEKVWQPHSCMMHKYKISEAKNCLVDKHIAFIGDSRIRQLFYSFVKIINPQFKEEGNKDFLWHPEVNGSMKQCIKVWTEDSIAKPHVIVAGAATWSIKIHNGSSEALSQYKMNITSIAPLLEKLAKTSDVYWVLQDPVYEDLLSENRKMITNEKIDAYNEAAVSILNSSTRNSKSNVKMFSVSKLIAQETIMESLDGLHLPESSRETVRNFYICQ

SEQ ID NO: 311 - protein, 150 aa, Homo sapiens
MAARGVIAPVGESLRYAEYLQPSAKRPDADVDQQGLVRSLIAVGLGVAALAFAGRYAFRIWKPLEQVITETAKKISTPSFSSYYKGGFEQKMSRREAGLILGVSPSAGKAKIRTAHRRVMILNHPDKGGSPYVAAKINEAKDLLETTTKH

SEQ ID NO: 312 - protein, 410 aa, Homo sapiens
MGEGKLKSSSRGSHGGSMREAGATRSPGVGIVSRPSPQFCTQLQNKRTVASTWKRMWIQTKWRTDTPSMDKILMEEVKLEEQLKEAVEEDKQALADTEGSEQSSQKLVEEGNMYSIQGFCKDSLEVADVLEKATQCVPEEEIKDNNPHLKNLSLWDHLVAGKEGQDSQSFYIMSMEKLSSTKLVPAPPKIGDRCTQHREKNKKLKSLPLSPQPRCLTPLSLMQQEAPGERFSPILYFCHVLITVWLPDLLRPVFAIPADGWLPLNVDCDEMPAEAYAIQAKGATLDHCGSIDESEEWYGMDTYECTRAGVSIHRATEPEVSSRPRTVSSGPLQARLSIRAASSGPNPCLTTTTFGPAPGSLCRPQAPRKILIGEVLLDALPRHEVTLPSSGVPRYFLCVCLVDSQYLTRL

SEQ ID NO: 313 - protein, 711 aa, Homo sapiens
MLDGPLFSEGPDSPRELQDEESGSCLWVQKSKLLVIEVKTISCHYSRRAPSRQPMDFQASHWARGFQNRTCGPRPGSPQPPPRRPWASRVLQEATNWRAGPLAEVRAREQEKRKAASQEREAKETERKRRKAGGARRSPPGRPRPEPRNAPRVAQLAGLPAPLRPERLAPVGRAPRPSAQPQSDPGSAWAGPWGGRRPGPPSYEAHLLLRGSAGTAPRRRWDRPPPYVAPPSYEGPHRTLGTKRGPGNSQVPTSSAPAATPARTDGGRTKKRLDPRIYRDVLGAWGLRQGQGLLGGSPGCGAARARPEPGKGVVEKSLGLAAADLNSGSDSHPQAKATGSAGTEIAPAGSATAAPCAPHPAPRSRHHLKGSREGKEGEQIWFPKCWIPSPKKQPPRHSQTLPRPWAPGGTGWRESLGLGEGAGPETLEGWKATRRAHTLPRSSQGLSRGEGVFVIDATCVVIRSQYVPTPRTQQVQLLPSGVTRVVGDSPSQSKPGKEEGEGATVFPSPCQKRLSSSRLLHQPGGGRGGEAEGGRPGDSTLEERTFRILGLPAPEVNLRDAPTQPGSPEHQALGPAASGAQGRAEGSEVAVVQRRAGRGWARTPGPYAGALREAVSRIRRHTAPDSDTDEAEELSVHSGSSDGSDTEAPGASWRNERTLPEVGNSSPEEDGKTAELSDSVGEILDVISQTEEVLFGVRDIRGTQQGNRKRQ

SEQ ID NO: 314 - protein, 201 aa, Homo sapiens
MLQQDSNDDTEDVSLFDAEEETTNRPRKAKIRHPVASFFHLFFRVSAIIVCLLCELLSSSFITCMVTIILLLSCDFWAVKNVTGRLMVGLRWWNHIDEDGKSHWVFESRKESSQENKTVSEAESRIFWLGLIACSVLWVIFAFSALFSFTVKWLAVVIMGVVLQGANLYGYIRCKVRSRKHLTSMATSYFGKQFLRQNTWR

SEQ ID NO: 315 - protein, 191 aa, Homo sapiens
MLSSIKCVLVGDSAVGKTSLLVRFTSETFPEAYKPTVYENTGVDVFMDGIQISLGLWDTAGNDAFRSIRPLSYQQADVVLMCYSVANHNSFLNLKNKWIGEIRSNLPCTPVLVVATQTDQREMGPHRASCVNAMEGKKLAQDVRAKGYLECSALSNRGVQQVFECAVRTAVNQARRRNRRRLFSINECKIF

SEQ ID NO: 316 - protein, 413 aa, Homo sapiens
MSFRDLRNFTEMMRALGYPRHISMENFRTPNFGLVSEVLLWLVKRYEPQTDIPPDVDTEQDRVFFIKAIAQFMATKAHIKLNTKKLYQADGYAVKELLKITSVLYNAMKTKGMEGSEIVEEDVNKFKFDLGSKIADLKAARQLASEITSKGASLYDLLGMEVELREMRTEAIARPLEINETEKVMRIAIKEILTQVQKTKDLLNNVASDEANLEAKIEKRKLELERNRKRLETLQSVRPCFMDEYEKTEEELQKQYDTYLEKFQNLTYLEQQLEDHHRMEQERFEEAKNTLCLIQNKLKEEEKRLLKSGSNDDSDIDIQEDDESDSELEERRLPKPQTAMEMLMQGRPGKRIVGTMQGGDSDDNEDSEESEIDMEDDDDEDDDLEDESISLSPTKPNRRVRKSEPLDESDNDF

SEQ ID NO: 317 - protein, 424 aa, Homo sapiens
MEAAQSSSTASSACIHCGGCYGRSLKKYSFESIREESSYSDIPDVKNDFAFMLHLIDQYDPLYSKRFAVFLSEVSENKLRQLNLNNEWTLDKLRQRLTKNAQDKLELHLFMLSGIPDTVFDLVELEVLKLELIPDVTIPPSIAQLTGLKELWLYHTAAKIEAPALAFLRENLRALHIKFTDIKEIPLWIYSLKTLEELHLTGNLSAENNRYIVIDGLRELKRLKVLRLKSNLSKLPQVVTDVGVHLQKLSINNEGTKLILWYNHIAYIPIQIGNLTNLERLYLNRNKIEKIPTQLFYCRKLRYLDLSHNNLTFLPADIGLLQNLQNLAITANRIETLPPELFQCRKLRALHLGNNVLQSLPSRVGELTNLTQIELRGNRLECLPVELGECPLLKRSGLVVEEDLFNTLPPEVKERLWRADKEQA

SEQ ID NO: 318 - protein, 400 aa, Homo sapiens
MRRAPAAERLLELGFPPRCGRQEPPFPLGVTRGWGRWPIQKRREGARPVPFSERSQEDGRGPAARSSGTLWRIRTRLSLCRDPEPPPPLCLLRVSLLCALRAGGRGSRWGEDGARLLLLPPARAAGNGEAEPSGGPSYAGRMLESSGCKALKEGVLEKRSDGLLQLWKKKCCILTEEGLLLIPPKQLQHQQQQQQQQQQQQQQPGQGPAEPSQPSGPAVASLEPPVKLKELHFSNMKTVDCVERKGKYMYFTVVMAEGKEIDFRCPQDQGWNAEITLQMVQYKNRQAILAVKSTRQKQQHLVQQQPPSQPQPQPQLQPQPQPQPQPQPQPQSQPQPQPQPKPQPQQLHPYPHPHPHPHSHPHSHPHPHPHPHPHQIPHPHPQPHSQPHGHRLLRSTSNSA

SEQ ID NO: 319 - protein, 1272 aa, Homo sapiens
MARTVVLITGCSSGIGLHLAVRLASDPSQSFKVYATLRDLKTQGRLWEAARALACPPGSLETLQLDVRDSKSVAAARERVTEGRVDVLVCNAGLGLLGPLEALGEDAVASVLDVNVVGTVRMLQAFLPDMKRRGSGRVLVTGSVGGLMGLPFNDVYCASKFALEGLCESLAVLLLPFGVHSLSLIECGPVHTAFMEKVLGSPEEVLDRTDIHTFHRFYQYLAHSKQVFREAAQNPEEVAEVFLTALRAPKPTLRYFTTERFLPLLRMRLDDPSGSNYVTAMHREVFGDVPAKAEAGAEAGGGAGPGAEDEAGRSARPRKQAHQRIWVVREPPTAARYTQGLSFSICEMGTWTDLSSSLPCENPRTERRGSDRHQGFTHSQSLRDQPHPISRTQPMPLEISRESRAEAKSRRLTFLRFRSSELRFLRLGSMAVFRSGLLVLTTPLASLAPRLASILTSAARLVNHTLYVHLQPGMSLEGPAQPQYSPVQATFEVLDFITHLYAGADVHRHLDVRILLTNIRTKSTFLPPLPTSVQNLAHPPEVVLTDFQTLDGSQYNPVKQQLVRYATSCYSCCPRLASVLLYSDYGIGEVPVEPLDVPLPSTIRPASPVAGSPKQPVRGYYRGAVGGTFDRLHNAHKVLLSVACILAQEQLVVGVADKDLLKSKLLPELLQPYTERVEHLSEFLVDIKPSLTFDVIPLLDPYGPAGSDPSLEFLVVSEETYRGGMAINRFRLENDLEELALYQIQLLKDLRHTENEEDKVSSSSFRQRMLGNLLRPPYERPELPTCLYVIGLTGISGSGKSSIAQRLKGLGAFVIDSDHLGHRAYAPGGPAYQPVVEAFGTDILHKDGIINRKVLGSRVFGNKKQLKILTDIMWPIIAKLAREEMDRAVAEGKRVCVIDAAVLLEAGWQNLVHEVWTAVIPETEAVRRIVERDGLSEAAAQSRLQSQMSGQQLVEQSHVVLSTLWEPHITQRQSLQPGGVGRCGWGLLCPVPDTPASSAGPVEYAYSDNSLDPGLFVESTRKGSVVSRANSIGSTSASSVPNTDDEDSDYHQEAYKESYKDRRRRAHTQAEQKRRDAIKRGYDDLQTIVPTCQQQDFSIGSQKLSKAIVLQKSMARESTGGDGAKRGCEEASASYPPMARPWCGDCHGIVGVWAIDYIQFLHKEKKKQEEEVSTLRKDVTALKIMKVNYEQIVKAHRDNPHEGEDQVSDQVKFNVFQGIMDSLFQSFNASISVASFQELSACVFSWIEEHCKPQTLREIVIGVLHQLKNQLY

SEQ ID NO: 320 - protein, 1025 aa, Homo sapiens
MARTVVLITGCSSGIGLHLAVRLASDPSQSFKVYATLRDLKTQGRLWEAARALACPPGSLETLQLDVRDSKSVAAARERVTEGRVDVLVCNAGLGLLGPLEALGEDAVASVLDVNVVGTVRMLQAFLPDMKRRGSGRVLVTGSVGGLMGLPFNDVYCASKFALEGLCESLAVLLLPFGVHSLSLIECGPVHTAFMEKVLGSPEEVLDRTDIHTFHRFYQYLAHSKQVFREAAQNPEEVAEVFLTALRAPKPTLRYFTTERFLPLLRMRLDDPSGSNYVTAMHREVFGDVPAKAEAGAEAGGGAGPGAEDEAGRSARPRKQAHQRIWVVREPPTAARYTQGLSFSICEMGTWTDLSSSLPCENPRTERRGSDRHQGFTHSQSLRDQPHPISRTQPMPLEISRESRAEAKSRRLTFLRFRSSELRFLRLGSMAVFRSGLLVLTTPLASLAPRLASILTSAARLVNHTLYVHLQPGMSLEGPAQPQYSPVQATFEVLDFITHLYAGADVHRHLDVRILLTNIRTKSTFLPPLPTSVQNLAHPPEVVLTDFQTLDGSQYNPVKQQLVRYATSCYSCCPRLASVLLYSDYGIGEVPVEPLDVPLPSTIRPASPVAGSPKQPVRGYYRGAVGGTFDRLHNAHKVLLSVACILAQEQLVVGVADKDLLKSKLLPELLQPYTERVEHLSEFLVDIKPSLTFDVIPLLDPYGPAGSDPSLEFLVVSEETYRGGMAINRFRLENDLEELALYQIQLLKDLRHTENEEDKVSSSSFRQRMLGNLLRPPYERPELPTCLYVIGLTGISGSGKSSIAQRLKGLGAFVIDSDHLGHRAYAPGGPAYQPVVEAFGTDILHKDGIINRKVLGSRVFGNKKQLKILTDIMWPIIAKLAREEMDRAVAEGKRVCVIDAAVLLEAGWQNLVHEVWTAVIPETEAVRRIVERDGLSEAAAQSRLQSQMSGQQLVEQSHVVLSTLWEPHITQRQSLQPGGVGRCGWGLLCPVPDTPASSAGPVEYAYTGPRAFCRKHPQGECSVQS

SEQ ID NO: 321 - protein, 1021 aa, Homo sapiens
MARTVVLITGCSSGIGLHLAVRLASDPSQSFKVYATLRDLKTQGRLWEAARALACPPGSLETLQLDVRDSKSVAAARERVTEGRVDVLVCNAGLGLLGPLEALGEDAVASVLDVNVVGTVRMLQAFLPDMKRRGSGRVLVTGSVGGLMGLPFNDVYCASKFALEGLCESLAVLLLPFGVHSLSLIECGPVHTAFMEKVLGSPEEVLDRTDIHTFHRFYQYLAHSKQVFREAAQNPEEVAEVFLTALRAPKPTLRYFTTERFLPLLRMRLDDPSGSNYVTAMHREVFGDVPAKAEAGAEAGGGAGPGAEDEAGRSARPRKQAHQRIWVVREPPTAARYTQGLSFSICEMGTWTDLSSSLPCENPRTERRGSDRHQGFTHSQSLRDQPHPISRTQPMPLEISRESRAEAKSRRLTFLRFRSSELRFLRLGSMAVFRSGLLVLTTPLASLAPRLASILTSAARLVNHTLYVHLQPGMSLEGPAQPQYSPVQATFEVLDFITHLYAGADVHRHLDVRILLTNIRTKSTFLPPLPTSVQNLAHPPEVVLTDFQTLDGSQYNPVKQQLVRYATSCYSCCPRLASVLLYSDYGIGEVPVEPLDVPLPSTIRPASPVAGSPKQPVRGYYRGAVGGTFDRLHNAHKVLLSVACILAQEQLVVGVADKDLLKSKLLPELLQPYTERVEHLSEFLVDIKPSLTFDVIPLLDPYGPAGSDPSLEFLVVSEETYRGGMAINRFRLENDLEELALYQIQLLKDLRHTENEEDKVSSSSFRQRMLGNLLRPPYERPELPTCLYVIGLTGISGSGKSSIAQRLKGLGAFVIDSDHLGHRAYAPGGPAYQPVVEAFGTDILHKDGIINRKVLGSRVFGNKKQLKILTDIMWPIIAKLAREEMDRAVAEGKRVCVIDAAVLLEAGWQNLVHEVWTAVIPETEAVRRIVERDGLSEAAAQSRLQSQMSGQQLVEQSHVVLSTLWEPHITQRQSLQPGGVGRCGWGLLCPVPDTPASSAGPVEYAYSDNSLDPGLLPARGV

SEQ ID NO: 322 - protein, 1046 aa, Homo sapiens
MARTVVLITGCSSGIGLHLAVRLASDPSQSFKVYATLRDLKTQGRLWEAARALACPPGSLETLQLDVRDSKSVAAARERVTEGRVDVLVCNAGLGLLGPLEALGEDAVASVLDVNVVGTVRMLQAFLPDMKRRGSGRVLVTGSVGGLMGLPFNDVYCASKFALEGLCESLAVLLLPFGVHSLSLIECGPVHTAFMEKVLGSPEEVLDRTDIHTFHRFYQYLAHSKQVFREAAQNPEEVAEVFLTALRAPKPTLRYFTTERFLPLLRMRLDDPSGSNYVTAMHREVFGDVPAKAEAGAEAGGGAGPGAEDEAGRSARPRKQAHQRIWVVREPPTAARYTQGLSFSICEMGTWTDLSSSLPCENPRTERRGSDRHQGFTHSQSLRDQPHPISRTQPMPLEISRESRAEAKSRRLTFLRFRSSELRFLRLGSMAVFRSGLLVLTTPLASLAPRLASILTSAARLVNHTLYVHLQPGMSLEGPAQPQYSPVQATFEVLDFITHLYAGADVHRHLDVRILLTNIRTKSTFLPPLPTSVQNLAHPPEVVLTDFQTLDGSQYNPVKQQLVRYATSCYSCCPRLASVLLYSDYGIGEVPVEPLDVPLPSTIRPASPVAGSPKQPVRGYYRGAVGGTFDRLHNAHKVLLSVACILAQEQLVVGVADKDLLKSKLLPELLQPYTERVEHLSEFLVDIKPSLTFDVIPLLDPYGPAGSDPSLEFLVVSEETYRGGMAINRFRLENDLEELALYQIQLLKDLRHTENEEDKVSSSSFRQRMLGNLLRPPYERPELPTCLYVIGLTGISGSGKSSIAQRLKGLGAFVIDSDHLGHRAYAPGGPAYQPVVEAFGTDILHKDGIINRKVLGSRVFGNKKQLKILTDIMWPIIAKLAREEMDRAVAEGKRVCVIDAAVLLEAGWQNLVHEVWTAVIPETEAVRRIVERDGLSEAAAQSRLQSQMSGQQLVEQSHVVLSTLWEPHITQRQSLQPGGVGRCGWGLLCPVPDTPASSAGPVEYAYSDNSLDPGLFVESTRKGSVVSRANSIGSTSASSVPNTERR

SEQ ID NO: 323 - protein, 293 aa, Homo sapiens
MRLHRLHARPSAVACGLLLLLLQGHYEAPAEGLCCRPVITVIASGSSWLSMCGVLGQGGALSPPKGPQTSMMRKPACFDGSKLGKFGKESKNMAGYQGVISWDTKGEKGGKMPRVVPDQRSKFENEEFFRKLSRECEIKYTGFRDRPHEERQARFQNACRDGRSEIAFVATGTNLSLQFFPASWQGEQRQTPSREYVDLEREAGKVYLKAPMILNGVCVIWKGWIDLQRLDGMGCLEFDEERAQQEDALAQQAFEEARRRTREFEDRDRSHREEMEVRVSQLLAVTGKKTTRP

SEQ ID NO: 324 - protein, 55 aa, Homo sapiens
MVPSSASGQVRSHYVDWRMWRDVKRRKMAYEYADERLRINSLRKNTILPKILQVS

SEQ ID NO: 325 - protein, 570 aa, Homo sapiens
MSCEVLRVLQLSDTAIVPIGYHVPRKAVEFHEDLFPDTAGCVPATDPHSWWAGDNQQVQKVSLNPACRPHPSFTSCLVPPAEPLPDTAQPAVMETPVGDADASPGALTLQHQWHRDQPQFEVAAEPAGSKFRHAQGTVLHRDSHITNLKGLNLTTPGESDGFCANKLRVAVPLLSSGGQVAVLELRKPGRLPDTALPTLQNGAAVTDLAWDPFDPHRLAVAGEDARIRLWRVPAEGLEEVLTTPETVLTGHTEKICSLRFHPLAANVLASSSYDLTVRIWDLQAGADRLKLQGHQDQIFSLAWSPDGQQLATVCKDGRVRVYRPRSGPEPLQEGPGPKGGRGARIVWVCDGRCLLVSGFDSQSERQLLLYEAEALAGGPLAVLGLDVAPSTLLPSYDPDTGLVLLTGKGDTRVFLYELLPESPFFLECNSFTSPDPHKGLVLLPKTECDVREVELMRCLRLRQSSLEPVAFRLPRVRKEFFQDDVFPDTAVIWEPVLSAEAWLQGANGQPWLLSLQPPDMSPGAPRDWVWGGSGMGVGERDRRPRLKFHSCWHAESSGLWEGGVAVSISL

SEQ ID NO: 326 - protein, 92 aa, Homo sapiens
MSFSRKKKKKDKDKAKLLEAMGTSKKNEEEKRRGLDKRTPAQAAFEKMQEKRQMERILKKASKTHKQRVEDFNRHLDTLTEHYDIPKVSWTK

SEQ ID NO: 327 - protein, 244 aa, Homo sapiens
MDILVPLLQLLVLLLTLPLHLMALLGCWQPLCKSYFPYLMAVLTPKSNRKMESKKRELFSQIKGLTGASGKVALLELGCGTGANFQFYPPGCRVTCLDPNPHFEKFLTKSMAENRHLQYERFVVAPGEDMRQLADGSMDVVVCTLVLCSVQSPRKVLQEVRRVLRPGGVLFFWEHVAEPYGSWAFMWQQVFEPTWKHIGDGCCLTRETWKDLENAQFSEIQMERQPPPLKWLPDGHHIMGKAVK

SEQ ID NO: 328 - protein, 764 aa, Homo sapiens
MTCLRTGTEGAQGGVGRGTQAGGPGGAPSLTPEAAGAARREDTSGPSVPLSFPAARCPRKVPGLPPLGLLESFGGCRALAARRQASRGAGTAAGSGRARLECSVQDARTGPARNPRPRASPPALTRPVRKADRAGDANLRPAPSDSKFSHWSRDPARHGNRRRLGGCAEMTACHWASGMSVPADDRPPRGGAAAPHLPEPLRRRWQGTRDRSLPADLREHPPTIQPRAGTGRAGAPSPDSGRVASATTPSSQVSFFSACYSLRAARRSLLSTSNCILHASREREFCCYPHFTVGKQPQRGSHLLEHSRLTLGPGGSLILTPLGPRSGETMEGAAESPKAAGSGSAQTPAQPEALAQPRGRGARRWQPPSDSAPSQRDAGMRRAAPPLAARPNGERAGFGLGGTGLAAVARGRGTRKSAAVAEATSRPVSAEPPCTTMCIIFFKFDPRPVSKNAYRLILAANRDEFYSRPSKLADFWGNNNEILSGLDMEEGKEGGTWLGISTRGKLAALTNYLQPQLDWQARGRGELVTHFLTTDVDSLSYLKKVSMEGHLYNGFNLIAADLSTAKGDVICYYGNRGEPDPIVLTPGTYGLSNALLETPWRKLCFGKQLFLEAVERSQALPKDVLIASLLDVLNNEEAQLPDPAIEDQGGEYVQPMLSKYAAVCVRCPGYGTRYCSTVGAPPPIPCPTSHARGPAKKPSAHSQSQASSSPEWIPELLPCPDAAAGTNTIILVDADGHVTFTERSMMDKDLSHWETRTYEFTLQS

SEQ ID NO: 329 - protein, 329 aa, Homo sapiens
MSGVVPTAPEQPAGEMENQTKPPDPRPDAPPEYNSHFLPRPPGTAVPPPTGYPGGLPMGYYSPQQPSTFPLYQPVGGIHPVRYQPGKYPMPNQSVPITWMPGPTPMANCPPGLEYLVQLDNIHVLQHFEPLEMMTCFETNNRYDIKNNSDQMVYVVTEDTDDFTRNAYRTLRPFVLRVTDCMGREIMTMQRPFRCTCCCFCCPSARQELEVQCPPGVTIGFVAEHWNLCRAVYSIQNEKKENVMRVRGPCSTYGCGSDSVFEVKSLDGISNIGSIIRKWNGLLSAMADADHFDIHFPLDLDVKMKAMIFGACFLIDFMYFERSPPQRSR

SEQ ID NO: 330 - protein, 119 aa, Homo sapiens
MVKMTKSKTFQAYLPNCHRTYSCIHCRAHLANHDELISKSFQGSQGRAYLFNSVVNVGCGPAEERVLLTGLHAVADIYCENCKTTLGWKYEHAFESSQKYKEGKFIIELAHMIKDNGWE

SEQ ID NO: 331 - protein, 1982 aa, Homo sapiens
MEERLGRLLPADWGVGGTAEGGGGAACRRCCLRCWAPGQLPGTLRPPWTSRRVTASSSATTTRAPRCKVLWALRSAAAAATGAAWYASLPDVQCLENCCFIYFVEFFGYLRRGELQNEAVFMWTAELENIATLCFKALENSNYGVRVAVSKLLGTVMATALMPKQATVMRQNVKRATFDEVLELMATGFLRGGSGFLKSGGEMLKVGGSVNREVRVGVTQAYVVFVTTLGGQWLERSFATFLSHVLDLVSHPRATQTHVEAVYSRRCVSFILRATVGSLLGEKAQIAAAKEICQAIGKQMKAVEAVVNDTSGENKFGAADIAASQHVMVCALQELGSLVQSLNATASPLIQEASIGLLEIVTSVLLHPSMAARLAAAWCLRCVAVALPFQLTPFLDRCAERLNNLKTSPEAVSGYSFAMAALLGGVHQCPLGIPHAKGKMVVSIAEDLLRTAAQNSRLSLQRTQAGWLLLGALMTLGPSVVRYHLPKMLLLWRNVFPRSLKELEAEKARGDSFTWQVTLEGRAGALCAMRSFVAHCPELLTEDVIRKLMTPIECAMTMMSHIPSVMKAHGAHLKASAAMVRLRLYDILALLPPKTYEGSFNALLRELVAEFTLTDNSANTTTSLLRSLCHYDDSVLLGSWLQETDHKSIEDQLQPNSASGSGALEHDPSSIYLRIPAGEAVPGPLPLGVSVIDASVALFGVVFPHVSYKHRLQMLDHFAECVKQAKGVRQQAVQLNIFTAVLSALKGLAENKSTLGPEEVRKSALTLVMGPLDNPNPILRCAAGEALGRMAQVVGEATFIARMAQYSFDKLKSARDVVSRTGHSLALGCLHRYVGGIGSGQHLKTSVSILLALAQDGTSPEVQTWSLHSLALIVDSSGPMYRGYVEPTLSLVLTLLLTVPPSHTEVHQCLGRCLGAIITTVGPELQGNGATTSTIRSSCLVGCAITQDHSDSLVQAAAISCLQQLHMFAPRHVNLSSLVPSLCVHLCSSHLLLRRAAVACLRQLAQREAAEVCEYAMSLAKNTGDKESSSANVSPFAPGVSSRTDIHCRHQGVNITETGLEGLLFGMLDRETDRKLCSDIHDTLGHMLSSLAVEKLSHWLMLCKDVLAASSDMSTATLLSSGKDEEAEKKDEMDDDTMFTTLGEEDKSKPFVAPRWATRVFAADCLCRIINLCENADQAHFDLALARSAKLRNPTNDLLVLHLSDLIRMAFMAATDHSNQLRMAGLQALEDIIKKFASVPEPEFPGHVILEQYQANVGAALRPAFSQDTPSDIIAKACQVCSTWIGSGVVSDLNDLRRVHNLLVSSLDKVQAGKGSSSQLYRESATTMEKLAVLKAWAEVYVVAMNIKKEAESKPKRAIKNTDDDDDDCGTIDELPPDSLITLVQPELPTLSRLWLAALKDYALLTLPAEFSSQLPPDGGAFYTPETIDTARLHYRNSWAPILHAVALWLNSTGFTCSESTEAAAISGLQKRSTSVNLNQASGAVGSAKSLPEINKDRMHLILGVSIQFLCSPRPEEPIEHVTACLQALHTLLDSPYARVHIAEDQLIGVELLSVLHRLLLTWNPSSVQLLVTGVVQQIVRAAQDYLQEKRNTLNEDDMEKEACTVLGEGGDSGGLIPGKSLVFATMELLMFILVRHMPHLSTKVSDSPSHIATKTRLSEESARLVAATVTILSDLPSLCSPAGCMTILPTILFLIARILKDTAIKSADNQVPPPVSAALQGIKSIVTLSMAKTEAGVQKQWTALIRSTLACILEYSQPEDSVPTPDEVSMLTAIALFLWSASNEIIGVQSLQNGCMNRFKNALNSCDPWVQAKCYQLLLSVFQHSNRALSTPYIHSLAPIVVEKLKAVERNRPASNIELLAVQEGIKVLETLVALGEEQNRVQLLALLVPTLISYLLDENSFASASSASKDLHEFALQNLMHIGPLYPHAFKTVMGAAPELKVRLETAVRASQASKAKAAARQPAPAIHSAPTIKLKTSFF

SEQ ID NO: 332 - protein, 640 aa, Homo sapiens
MLRSTLAQQGTPVYSVAWGPDSEKVLYTAGKQLIIKPLQPNAKVLQWKAHDGIILKVDWNSVNDLILSAGEDCKYKVWDSYGRPLYNSQPHEHPITSVAWAPDGELFAVGSFHTLRLCDKTGWSYALEKPNTGSIFNIAWSIDGTQIAGACGNGHVVFAHVVEQHWEWKNFQVTLTKRRAMQVRNVLNDAVDLLEFRDRVIKASLNYAHLVVSTSLQCYVFSTKNWNTPIIFDLKEGTVSLILQAERHFLLVDGSSIYLYSYEGRFISSPKFPGMRTDILNAQTVSLSNDTIAIRDKADEKIIFLFEASTGKPLGDGKFLSHKNEILEIALDQKGLTNDRKIAFIDKNRDLCITSVKRFGKEEQIIKLGTMVHTLAWNDTCNILCGLQDTRFIVWYYPNTVYVDRDILPKTLYERDASEFSKNPHIVSFVGNQVTIRRADGSLVHISITPYPAILHEYVSSSKWEDAVRLCRFVKEQTMWACLAAMAVANRDMTTAEIAYAAIGEIDKVQYINSIKNLPSKESKMAHILLFSGNIQEAEIVLLQAGLVYQAIQININLYNWERALELAVKYKTHVDTVLAYRQKFLETFGKQETNKRYLHYAEGLQIDWEKIKAKIEMEITKEREQSSSSQSSKSIGLKP

SEQ ID NO: 333 - protein, 126 aa, Homo sapiens
MAPGEVTITVRLIRSFEHRNFKPVVYHGVNLDQTVKEFIVFLKQDVPLRTNLPPPFRNYKYDALKIIHQAHKSKTNELVLSLEDDERLLLKEDSTLKAAGIASETEIAFFCEEDYRNYKANPISSW

SEQ ID NO: 334 - protein, 467 aa, Homo sapiens
MDEGGTPLLPDSLVYQIFLSLGPADVLAAGLVCRQWQAVSRDEFLWREQFYRYYQVARDVPRHPAAMSWYEEFQRLYDTVPCVEVQTLREHTDQVLHLSFSHSGYQFASCSKDCTVKIWSNDLTISLLHSADMRPYNWSYTQFSQFNKDDSLLLASGVFLGPHNSSSGEIAVISLDSFALLSRVRNKPYDVFGCWLTETSLISGNLHRIGDITSCSVLWLNNAFQDVESENVNVVKRLFKIQNLNASTVRTVMVADCSRFDSPDLLLEAGDPATSPCRIFDLGSDNEEVVAGPAPAHAKEGLRHFLDRVLEGRAQPQLSERMLETKVAELLAQGHTKPPERSATGAKSKYLIFTTGCLTYSPHQIGIKQILPHQMTTAGPVLGEGRGSDAFFDALDHVIDIHGHIIGMGLSPDNRWASCQCPRRGARRRPTPSTVPLAQVPVREQPRLAQRCGGGRPHAAATNRGGD

SEQ ID NO: 335 - protein, 722 aa, Homo sapiens
MSAESGPGTRLRNLPVMGDGLETSQMSTTQAQAQPQPANAASTNPPPPETSNPNKPKRQTNQLQYLLRVVLKTLWKHQFAWPFQQPVDAVKLNLPDYYKIIKTPMDMGTIKKRLENNYYWNAQECIQDFNTMFTNCYIYNKPGDDIVLMAEALEKLFLQKINELPTEETEIMIVQAKGRGRGRKETGTAKPGVSTVPNTTQASTPPQTQTPQPNPPPVQATPHPFPAVTPDLIVQTPVMTVVPPQPLQTPPPVPPQPQPPPAPAPQPVQSHPPIIAATPQPVKTKKGVKRKADTTTPTTIDPIHEPPSLPPEPKTTKLGQRRESSRPVKPPKKDVPDSQQHPAPEKSSKVSEQLKCCSGILKEMFAKKHAAYAWPFYKPVDVEALGLHDYCDIIKHPMDMSTIKSKLEAREYRDAQEFGADVRLMFSNCYKYNPPDHEVVAMARKLQDVFEMRFAKMPDEPEEPVVAVSSPAVPPPTKVVAPPSSSDSSSDSSSDSDSSTDDSEEERAQRLAELQEQLKAVHEQLAALSQPQQNKPKKKEKDKKEKKKEKHKRKEEVEENKKSKAKEPPPKKTKKNNSSNSNVSKKEPAPMKSKPPPTYESEEEDKCKPMSYEEKRQLSLDINKLPGEKLGRVVHIIQSREPSLKNSNPDEIEIDFETLKPSTLRELERYVTSCLRKKRKPQAEKVDVIAGSSKMKGFSSSESESSSESSSSDSEDSETGPA

SEQ ID NO: 336 - protein, 563 aa, Homo sapiens
MTPDLLNFKKGWMSILDEPGEPPSPSLTTTSTSQWKKHWFVLTDSSLKYYRDSTAEEADELDGEIDLRSCTDVTEYAVQRNYGFQIHTKDAVYTLSAMTSGIRRNWIEALRKTVRPTSAPDVTKLSDSNKENALHSYSTQKGPLKAGEQRAGSEVISRGGPRKADGQRQALDYVELSPLTQASPQRARTPARTPDRLAKQEELERDLAQRSEERRKWFEATDSRTPEVPAGEGPRRGLGAPLTEDQQNRLSEEIEKKWQELEKLPLRENKRVPLTALLNQSRGERRGPPSDGHEALEKEVQALRAQLEAWRLQGEAPQSALRSQEDGHIPPGYISQEACERSLAEMESSHQQVMEELQRHHERELQRLQQEKEWLLAEETAATASAIEAMKKAYQEELSRELSKTRSLQQGPDGLRKQHQSDVEALKRELQVLSEQYSQKCLEIGALMRQAEEREHTLRRCQQEGQELLRHNQELHGPPVRGDRPAARLHCLAGHGQWLRAQQRAEFLRARGAASRKRKRTPVPKEGGAVPPGRAPDDAEGQALHLGKVPGRLCGAEPHQDTV

SEQ ID NO: 337 - protein, 134 aa, Homo sapiens
MVCGLLVSLDWLGDLGQYLQSCCFCFICKNYDPHTPAAAQGTVIFYTCVDVFVHSSWFITPITLCYNVGTLQASENGISVCDLLLPHFTCSTPDFNLTVAHKTLIPERVLPHTRKEERCTERPRSIWTDRPCWV

SEQ ID NO: 338 - protein, 2041 aa, Homo sapiens
MDSTNMDSNLKPEEVVHKEKRRTKSLLEEKLVLKSKSKTQGKQVKVVETELQEGATKQATTPKPDKEKNTEENDSEKQRKSKVEDKPFEETGVEPVLETASSSAHSTQKDSSHRAKLPLAKEKYKSDKDSTSTRLERKLSDGHKSRSLKHSSKNIKKKDENKSDDKDGKEVDSSHEKARGNSSLMEKKLSRRLCENRRGSLSQEMAKGEEKLAANTLSTPSGSSLQRPKKSGDMTLIPEQEPMEIDSEPGVENVFEVSKTQDNRNNNSQQDIDSENMKQKTSATVQKDELRTCTADSKATAPAYKPGRGTGVNSNSEKHADHRSTLTKKMHIQSAVSKMNPGEKEPIHRGTTEVNIDSETVHRMLLSAPSENDRVQKNLKNTAAEEHVAQGDATLEHSTNLDSSPSLSSVTVVPLRESYDPDVIPLFDKRTVLEGSTASTSPADHSALPNQSLTVRESEVLKTSDSKEGGEGFTVDTPAKASITSKRHIPEAHQATLLDGKQGKVIMPLGSKLTGVIVENENITKEGGLVDMAKKENDLNAEPNLKQTIKATVENGKKDGIAVDHVVGLNTEKYAETVKLKHKRSPGKVKDISIDVERRNENSEVDTSAGSGSAPSVLHQRNGQTEDVATGPRRAEKTSVATSTEGKDKDVTLSPVKAGPATTTSSETRQSEVALPCTSIEADEGLIIGTHSRNNPLHVGAEASECTVFAAAEEGGAVVTEGFAESETFLTSTKEGESGECAVAESEDRAADLLAVHAVKIEANVNSVVTEEKDDAVTSAGSEEKCDGSLSRDSEIVEGTITFISEVESDGAVTSAGTEIRAGSISSEEVDGSQGNMMRMGPKKETEGTVTCTGAEGRSDNFVICSVTGAGPREERMVTGAGVVLGDNDAPPGTSASQEGDGSVNDGTEGESAVTSTGITEDGEGPASCTGSEDSSEGFAISSESEENGESAMDSTVAKEGTNVPLVAAGPCDDEGIVTSTGAKEEDEEGEDVVTSTGRGNEIGHASTCTGLGEESEGVLICESAEGDSQIGTVVEHVEAEAGAAIMNANENNVDSMSGTEKGSKDTDICSSAKGIVESSVTSAVSGKDEVTPVPGGCEGPMTSAASDQSDSQLEKVEDTTISTGLVGGSYDVLVSGEVPECEVAHTSPSEKEDEDIITSVENEECDGLMATTASGDITNQNSLAGGKNQGKVLIISTSTTNDYTPQVSAITDVEGGLSDALRTEENMEGTRVTTEEFEAPMPSAVSGDDSQLTASRSEEKDECAMISTSIGEEFELPISSATTIKCAESLQPVAAAVEERATGPVLISTADFEGPMPSAPPEAESPLASTSKEEKDECALISTSIAEECEASVSGVVVESENERAGTVMEEKDGSGIISTSSVEDCEGPVSSAVPQEEGDPSVTPAEEMGDTAMISTSTSEGCEAVMIGAVLQDEDRLTITRVEDLSDAAIISTSTAECMPISASIDRHEENQLTADNPEGNGDLSATEVSKHKVPMPSLIAENNCRCPGPVRGGKEPGPVLAVSTEEGHNGPSVHKPSAGQGHPSAVCAEKEEKHGKECPEIGPFAGRGQKESTLHLINAEEKNVLLNSLQKEDKSPETGTAGGSSTASYSAGRGLEGNANSPAHLRGPEQTSGQTAKDSSVSSIRYLAAVNTGAIKADDMPPVQGTVAEHSFLPAEQQGSEDNLKTSTTKCITGQESKIAPSHTMIPPATYSVALLAPKCEQDLTIKNDYSGKWTDQASAEKTGDDNSTRKSFPEEGDIMVTVSSEENAYVPSEEEKNGEILAPPESLCGGKPSGIEISSGRKDNAEAISGHSVEADPKEEENSRDLEELPKTSSETNSTTSRVMEEKDEYSSSETTGEKPEQNDDDTIKSQEDDGEEKIVTSVRRRGRKPKRSLTVSDDAESSEPERKRQKSVSDPVEDKKEQESDEEEEEEEEDEPSGATTRSTTRSEAQRKQHSKPSARATSKLGSPDTVSPRNRQKLAKEKLPTSEKVSNSPPLGRSKTQLSPSIKRKREVSPPGARTRGQQRVEEAPVKKAKR

SEQ ID NO: 339 - protein, 1994 aa, Homo sapiens
MDSTNMDSNLKPEEVVHKEKRRTKSLLEEKLVLKSKSKTQGKQVKVVETELQEGATKQATTPKPDKEKNTEENDSEKQRKSKVEDKPFEETGVEPVLETASSSAHSTQKDSSHRAKLPLAKEKYKSDKDSTSTRLERKLSDGHKSRSLKHSSKNIKKKDENKSDDKDGKEVDSSHEKARGNSSLMEKKLSRRLCENRRGSLSQEMAKGEEKLAANTLSTPSGSSLQRPKKSGDMTLIPEQEPMEIDSEPGVENVFEVSKTQDNRNNNSQQDIDSENMKQKTSATVQKDELRTCTADSKATAPAYKPGRGTGVNSNSEKHADHRSTLTKKMHIQSAVSKMNPGEKEPIHRGTTEVNIDSETVHRMLLSAPSENDRVQKNLKNTAAEEHVAQGDATLEHSTNLDSSPSLSSVTVVPLRESYDPDVIPLFDKRTVLEGSTASTSPADHSALPNQSLTVRESEVLKTSDSKEGGEGFTVDTPAKASITSKRHIPEAHQATLLDGKQGKVIMPLGSKLTGVIVENENITKEGGLVDMAKKENDLNAEPNLKQTIKATVENGKKDGIAVDHVVGLNTEKYAETVKLKHKRSPGKVKDISIDVERRNENSEVDTSAGSGSAPSVLHQRNGQTEDVATGPRRAEKTSVATSTEGKDKDVTLSPVKAGPATTTSSETRQSEVALPCTSIEADEGLIIGTHSRNNPLHVGAEASECTVFAAAEEGGAVVTEGFAESETFLTSTKEGESGECAVAESEDRAADLLAVHAVKIEANVNSVVTEEKDDAVTSAGSEEKCDGSLSRDSEIVEGTITFISEVESDGAVTSAGTEIRAGSISSEEVDGSQGNMMRMGPKKETEGTVTCTGAEGRSDNFVICSVTGAGPREERMVTGAGVVLGDNDAPPGTSASQEGDGSVNDGTEGESAVTSTGITEDGEGPASCTGSEDSSEGFAISSESEENGESAMDSTVAKEGTNVPLVAAGPCDDEGIVTSTGAKEEDEEGEDVVTSTGRGNEIGHASTCTGLGEESEGVLICESAEGDSQIGTVVEHVEAEAGAAIMNANENNVDSMSGTEKGSKDTDICSSAKGIVESSVTSAVSGKDEVTPVPGGCEGPMTSAASDQSDSQLEKVEDTTISTGLVGGSYDVLVSGEVPECEVAHTSPSEKEDEDIITSVENEECDGLMATTASGDITNQNSLAGGKNQGKVLIISTSTTNDYTPQVSAITDVEGGLSDALRTEENMEGTRVTTEEFEAPMPSAVSGDDSQLTASRSEEKDECAMISTSIGEEFELPISSATTIKCAESLQPVAAAVEERATGPVLISTADFEGPMPSAPPEAESPLASTSKEEKDECALISTSIAEECEASVSGVVVESENERAGTVMEEKDGSGIISTSSVEDCEGPVSSAVPQEEGDPSVTPAEEMGDTAMISTSTSEGCEAVMIGAVLQDEDRLTITRVEDLSDAAIISTSTAECMPISASIDRHEENQLTADNPEGNGDLSATEVSKHKVPMPSLIAENNCRCPGPVRGGKEPGPVLAVSTEEGHNGPSVHKPSAGQGHPSAVCAEKEEKHGKECPEIGPFAGRGQKESTLHLINAEEKNVLLNSLQKEDKSPETGTAGGSSTASYSAGRGLEGNANSPAHLRGPEQTSGQTAKDSSVSSIRYLAAVNTGAIKADDMPPVQGTVAEHSFLPAEQQGSEDNLKTSTTKCITGQESKIAPSHTMIPPATYSVALLAPKCEQDLTIKNDYSGKWTDQASAEKTGDDNSTRKSFPEEGDIMVTVSSEENAYVPSEEEKNGEILAPPESLCGGKPSGIEISSGRKDNAEAISGHSVEADPKEEENSRDLEELPKTSSETNSTTSRVMEEKDEYSSSETTGEKPEQNDDDTIKSQEDDGEEKIVTSVRRRGRKPKRSLTVSDDAESSEPERKRQKSVSDPVEDKKEQESDEEEEEEEEDEPSGATTRSTTRSEAQRSKTQLSPSIKRKREVSPPGARTRGQQRVEEAPVKKAKR

SEQ ID NO: 340 - protein, 462 aa, Homo sapiens
MNESKPGDSQNLACVFCRKHDDCPNKYGEKKTKEKWNLTVHYYCLLMSSGIWQRGKEEEGVYGFLIEDIRKEVNRASKLVQAINAGVFFFRCTICNNSDIFQKEMLRMGIHIPEKDASWELEENAYQELLQHYERCDVRRCRCKEGRDYNAPDSKWEIKRCQCCGSSGTHLACSSLRSWEQNWECLECRGIIYNSALKENLYYEAGKMLAISLVHGGPSPGFFSKTLFNCLVYGPENTQPILDDVSDFDVAQIIIRINTATTVADLKSIINECYNYLELIGCLRLITTLSDKYMLVKDILGYHVIQRVHTPFESFKQGLKTLGVLEKIQAYPEAFCSILCHKPESLSAKILSELFTVHTLPDVKALGFWNSYLQAVEDGKSTTTMEDILIFATGCSSIPPAGFKPTPSIECLHVDFPVGNKCNNCLAIPITNTYKEFQENMDFTIRNTLRLEKEESSHYIGH

SEQ ID NO: 341 - protein, 571 aa, Homo sapiens
MAELVQGQSAPVGMKAEGFVDALHRVRQIAAKIDSIPHLNNSTPLVDPSVYGYGVQKRPLDDGGNQLGALVHQRTVITEEFKVPDKMVGFIIGRGGEQISRIQAESGCKIQIASESSGIPERPCVLTGTPESIEQAKRLLGQIVDRCRNGPGFHNDIDSNSTIQEILIPASKVGLVIGRGGETIKQLQERTGVKMVMIQDGPLPTGADKPLRITGDAFKVQQAREMVLEIIREKDQADFRGVRGDFNSRMGGGSIEVSVPRFAVGIVIGRNGEMIKKIQNDAGVRIQFKPDDGISPERAAQVMGPPDRCQHAAHIISELILTAQERDGFGGLAAARGRGRGRGDWSVGAPGGVQEITYTVPADKCGLVIGKGGENIKSINQQSGAHVELQRNPPPNSDPNLRRFTIRGVPQQIEVARQLIDEKVGGTNLGAPGAFGQSPFSQPPAPPHQNTFPPRSSGCFPNMAAKVNGNPHSTPVSGPPAFLTQGWGSTYQAWQQPTQQVPSQQSQPQSSQPNYSKAWEDYYKKQSHAASAAPQASSPPDYTMAWAEYYRQQVAFYGQTLGQAQAHSQEQ

SEQ ID NO: 342 - protein, 916 aa, Homo sapiens
MPPLKSPAAFHEQRRSLERARTEDYLKRKIRSRPERSELVRMHILEETSAEPSLQAKQLKLKRARLADDLNEKIAQRPGPMELVEKNILPVESSLKEAIIVGQVNYPKVADSSSFDEDSSDALSPEQPASHESQGSVPSPLEARVSEPLLSATSASPTQVVSQLPMGRDSREMLFLAEQPPLPPPPLLPPSLTNGTTIPTAKSTPTLIKQSQPKSASEKSQRSKKAKELKPKVKKLKYHQYIPPDQKQDRGAPPMDSSYAKILQQQQLFLQLQILNQQQQQHHNYQAILPAPPKSAGEALGSSGTPPVRSLSTTNSSSSSGAPGPCGLARQNSTSLTGKPGALPANLDDMKVAELKQELKLRSLPVSGTKTELIERLRAYQDQISPVPGAPKAPAATSILHKAGEVVVAFPAARLSTGPALVAAGLAPAEVVVATVASSGVVKFGSTGSTPPVSPTPSERSLLSTGDENSTPGDTFGEMVTSPLTQLTLQASPLQILVKEEGPRAGSCCLSPGGRAELEGRDKDQMLQEKDKQIEALTRMLRQKQQLVERLKLQLEQEKRAQQPAPAPAPLGTPVKQENSFSSCQLSQQPLGPAHPFNPSLAAPATNHIDPCAVAPGPPSVVVKQEALQPEPEPVPAPQLLLGPQGPSLIKGVAPPTLITDSTGTHLVLTVTNKNADSPGLSSGSPQEMDLEHPLQPLFGTPTSLLKKEPPGYEEAMSQQPKQQENGSSSQQMDDLFDILIQSGEISADFKEPPSLPGKEKPSPKTVCGSPLAAQPSPSAELPQAAPPPPGSPSLPGRLEDFLESSTGLPLLTSGHDGPEPLSLIDDLHSQMLSSTAILDHPPSPMDTSELHFVPEPSSTMGLDLADGHLDSMDWLELSSGGPVLSLAPLSTTAPSLFSTDFLDGHDLQLHWDSCL

SEQ ID NO: 343 - protein, 77 aa, Homo sapiens
MGDVKNFLYAWCGKRKMTPSYEIRAVGNKNRQKFMCEVQVEGYNYTGMGNSTNKKDAQSNAARDFVNYSGRINEIDM

SEQ ID NO: 344 - protein, 252 aa, Homo sapiens
MGNAEVGKSCIIKRYCEKRFVSKYLATIGIDYGVTKVHVRDREIKVNIFDMAGHPFFYEVRNEFYKDTQGVILVYDVGQKDSFDALDAWLAEMKQELGPHGNMENIIFVVCANKIDCTKHRCVDESEGRLWAESKGFLYFETSAQTGEGINEMFQTFYISIVDLCENGGKRPTTNSSASFTKEQADAIRRIRNSKDSWDMLGVKPGASRDEVNKAYRKLAVLLHPDKCVAPGSEDAFKAVVNARTALLKNIK

SEQ ID NO: 345 - protein, 63 aa, Homo sapiens
MESHSRKSLFPESAIVARGHVFQQRLGSGPLCPLPTLSPKSGPPLTSLALHLGVPPSPRYGPR

SEQ ID NO: 346 - protein, 1594 aa, Homo sapiens
MGFHHVGHAGLEHLTSGDRLGRRSSSKRALKAEGTPGRRGAQRSQKERAGGSPSPGSPRRKQTGRRRHREELGEQERGEAERTCEGRRKRDERASFQERTAAPKREKEIPRREEKSKRQKKPRSSSLASSASGGESLSEEELARILEQVEEKKKLIATMRSKPWPMAKKLTELREAQEFVEKYEGALGKGKGKQLYAYKMLMAKKWVKFKRDFDNFKTQCIPWEMKIKDIESHFGSSVASYFIFLRWMYGVNLVLFGLIFGLVIIPEDVYVIPEEPSVMLQELAGKAPLDDKFMYFSSNTGSYGLGFDQGYNYLEAELKKIRFQAHSHGYWQISEDTISSLLTWLLAGLRKSASNLTYVAVPKVQGYIKYSALFYGYYNNQRTIGWLRYRLPMAYFMVGVSVFGYSLIIVIRSMASNTQGSTGEGESDNFTFSFKMFTSWDYLIGNSETADNKYASITTSFKESIVDEQESNKEENIHLTRFLRVLANFLIICCLCGSGYLIYFVVKRSQQFSKMQNVSWYERNEVEIVMSLLGMFCPPLFETIAALENYHPRTGLKWQLGRIFALFLGNLYTFLLALMDDVHLKLANEETIKNITHWTLFNYYNSSGWNESVPRPPLHPADVPRGSCWETAVGIEFMRLTVSDMLVTYITILLGDFLRACFVRFMNYCWCWDLEAGFPSYAEFDISGNVLGLIFNQGMIWMGSFYAPGLVGINVLRLLTSMYFQCWAVMSSNVPHERVFKASRSNNFYMGLLLLVLFLSLLPVAYTIMSLPPSFDCGPFSGKNRMYDVLQETIENDFPTFLGKIFAFLANPGLIIPAILLMFLAIYYLNSVSKSLSRANAQLRKKIQVLREVEKSHKSVKGKATARDSEDTPKSSSKNATQLQLTKEETTPPSASQSQAMDKKAQGPGTSNSASRTTLPASGHLPISRPPGIGPDSGHAPSQTHPWRQSLGLGLGLGLGLGLRLRLPWERVPADAEVALTLAPRLPFQVLLHVLFEHAVGYALLALKEVEEISLLQPAACTARSHVAGRPVEESVLNLGKFHSIVRLVAFCPFASSQVALENANAVSEGVVHEDLRLLLETHLPSKKKKVLLGVGDPKIGAAIQEELGYNCQTGGVIAEILRGVRLHFHNLVKGLTDLSACKAQLGLGHSYSRAKVKFNVNRVDNMIIQSISLLDQLDKDINTFSMRVREWYGYHFPELVKIINDNATYCRLAQFIGNRRELNEDKLEKLEELTMDGAKAKAILDASRSSMGMDISAIDLINIESFSSRVVSLSEYRQSLHTYLRSKMSQVAPSLSALIGEAVGARLIAHAGSLTNLAKYPASTVQILGAEKALFRALKTRGNTPKYGLIFHSTFIGRAAAKNKGRISRYLANKCSIASRIDCFSEVPTSVFGEKLREQVEERLSFYETGEIPRKNLDVMKEAMVQAEEAAAEITRKLEKQEKKRLKKEKKRLAALALASSENSSSTPEECEEMSEKPKKKKKQKPQEVPQENGMEDPSISFSKPKKKKSFSKEELMSSDLEETAGSTSIPKRKKSTPKEETVNDPEEAGHRSGSKKKRKFSKEEPVSSGPEEAAGKSSSKKKKKFHKASQED

SEQ ID NO: 347 - protein, 427 aa, Homo sapiens
MTTAASEVPSFLVERMANVRRRRQDRRGMEGGILKSRIVTWEPSEEFVRNNHVINTPLQTMHIMADLGPYKKLGYKKYEHVLCTLKVDSNGVITVKPDFTGLKGPYRIETEGEKQELWKYTIDNVSPHAQPEEEERERRVFKDLYGRHKEYLSSLVGTDFEMTVPGALRLFVNGEVVSAQGYEYDNLYVHFFVELPTARELTIFGLWLSDWSSPAFQQLSGVTQTCTTKSLAMDKVAHFSYPFTFEAFFLHEDESSDALPEWPVLYCEVLSLDFWQRYRVEGYGAVVLPATPGSHTLTVSTWRPVELGTVAELRRFFIGGSLELEDLSYVRIPGSFKGERLSRFGLRTETTGTVTFRLHCLQQSRAFMESSSLQKRMRSVLDRLEGFSQQSSIHNVLEAFRRARRRMQEARESLPQDLVSPSGTLVS

SEQ ID NO: 348 - protein, 289 aa, Homo sapiens
MTTAASEVPSFLVERMANVRRRRQDRRGMEGGILKSRIVTWEPSEEFVRNNHVINTPLQTMHIMADLGPYKKLGYKKYEHVLCTLKVDSNGVITVKPDFTGLKGPYRIETEGEKQELWKYTIDNVSPHAQPEEEERERRVFKDLYGRHKEYLSSLVGTDFEMTVPGALRLFVNGEVVSAQGYEYDNLYVHFFVELPTAHWSSPAFQQLSGVTQTCTTKSLAMDKVAHFSYPFTFEAFFLHEDESSDALPEWPVLYCEVLSLDFWQRYRVEGYGAVVLPATPATMTWPWH

SEQ ID NO: 349 - protein, 477 aa, Homo sapiens
MTPEDPEETQPLLGPPGGSAPRGRRVFLAAFAAALGPLSFGFALGYSSPAIPSLQRAAPPAPRLDDAAASWFGAVVTLGAAAGGVLGGWLVDRAGRKLSLLLCSVPFVAGFAVITAAQDVWMLLGGRLLTGLACGVASLVAPVYISEIAYPAVRGLLGSCVQLMVVVGILLAYLAGWVLEWRWLAVLGCVPPSLMLLLMCFMPETPRFLLTQHRRQEAMAALRFLWGSEQGWEDPPIGAEQSFHLALLRQPGIYKPFIIGVSLMAFQQLSGVNAVMFYAETIFEEAKFKDSSLASVVVGVIQVLFTAVAALIMDRAGRRLLLVLSGVVMVFSTSAFGAYFKLTQGGPGNSSHVAISAPVSAQPVDASVGLAWLAVGSMCLFIAGFAVGWGPIPWLLMSEIFPLHVKGVATGICVLTNWLMAFLVTKEFSSLMEVLRPYGAFWLASAFCIFSVLFTLFCVPETKGKTLEQITAHFEGR

SEQ ID NO: 350 - protein, 408 aa, Homo sapiens
MTPEDPEETQPLLGPPGGSAPRGRRVFLAAFAAALGPLSFGFALGYSSPAIPSLQRAAPPAPRLDDAAASWFGVYISEIAYPAVRGLLGSCVQLMVVVGILLAYLAGWVLEWRWLAVLGCVPPSLMLLLMCFMPETPRFLLTQHRRQEAMAALRFLWGSEQGWEDPPIGAEQSFHLALLRQPGIYKPFIIGVSLMAFQQLSGVNAVMFYAETIFEEAKFKDSSLASVVVGVIQVLFTAVAALIMDRAGRRLLLVLSGVVMVFSTSAFGAYFKLTQGGPGNSSHVAISAPVSAQPVDASVGLAWLAVGSMCLFIAGFAVGWGPIPWLLMSEIFPLHVKGVATGICVLTNWLMAFLVTKEFSSLMEVLRPYGAFWLASAFCIFSVLFTLFCVPETKGKTLEQITAHFEGR

SEQ ID NO: 351 - protein, 239 aa, Homo sapiens
MAEDKTKPSELDQGKYDADDNVKIICLGDSAVGKSKLMERFLMDGFQPQQLSTYALTLYKHTATVDGKTILVDFWDTAGQERFQSMHASYYHKAHACIMVFDVQRKVTYRNLSTWYTELREFRPEIPCIVVANKIDADINVTQKSFNFAKKFSLPLYFVSAADGTNVVKVWLTAEVASKLFNDAIRLAVSYKQNSQDFMDEIFQELENFSLEQEEEDVPDQEQSSSIETPSEEVASPHS

SEQ ID NO: 352 - protein, 302 aa, Homo sapiens
MAEDKTKPSELDQGKYDADDNVKIICLGDSAVGKSKLMERFLMDGLYPSRFEVLLVPVGLPTLMYQCPTAHPFVPAAQEQEGGLDFDGQDTLSSPPTPHPSMELVPVCSQPQQLSTYALTLYKHTATVDGKTILVDFWDTAGQERFQSMHASYYHKAHACIMVFDIQRKVTYRNLSTWYTELREFRPEIPCIVVANKIDADINVTQKSFNFAKKFSLPLYFVSAADGTNVVKVWLTAEVASKLFNDAIRLAVSYKQNSQDFMDEIFQELENFSLEQEEEDVPDQEQSSSIETPSEEVASPHS

SEQ ID NO: 353 - protein, 101 aa, Homo sapiens
MAEDLTKPSELDQGKYDADDNVKIICLGDSAVGKSKLMERFLMDGFQPQQLSTYALTLYKHTATVDGKTILVDFWDTAGQERFQSMHASYYHKAHACIMQT

SEQ ID NO: 354 - protein, 172 aa, Homo sapiens [sequence omitted]

SEQ ID NO: 355 - protein, 393 aa, Homo sapiens
MDENESNQSLMTSSQYPKEAVRKRQNSARNSGASDSSRFSRKSFKLDYRLEEDVTKSKKGKDGRFVNPWPTWKNPSIPNVLRWLIMEKDHSSVPSSKEELDKELPVLKPYFITNPEEAGVREAGLRVTWLGHATVMVEMDELIFLTDPIFSSRASPSQYMGPKRFRRSPCTISELPPIDAVLISHNHYDHLDYNSVIALNERFGNELRWFVPLGLLDWMQKCGCENVIELDWWEENCVPGHDKVTFVFTPSQHWCKRTLMDDNKVLWGSWSVLGPWNRFFFAGDTGYCPAFEEIGKRFGPFDLAAIPIGAYEPRWFMKYQHVDPEEAVRIHTDVQTKKSMAIHWGTFALANEHYLEPPVKLNEALERYGLNAEDFFVLKHGESRYLNNNDENF

SEQ ID NO: 356 - protein, 386 aa, Homo sapiens
MCSSVAAKLWFLTDRRIREDYPQKEILRALKAKCCEEELDFRAVVMDEVVLTIEQGNLGLRINGELITAYPQVVVVRVPTPWVQSDSDITVLRHLEKMGCRLMNRPQAILNCVNKFWTFQELAGHGVPLPDTFSYGGHENFAKMIDEAEVLEFPMVVKNTRGHRGKAVFLARDKHHLADLSHLIRHEAPYLFQKYVKESHGRDVRVIVVGGRVVGTMLRCSTDGRMQSNCSLGGVGMMCSLSEQGKQLAIQVSNILGMDVCGIDLLMKDDGSFCVCEANANVGFIAFDKACNLDVAGIIADYAASLLPSGRLTRRMSLLSVVSTASETSEPELGPPASTAVDNMSASSSSVDSDPESTERELLTKLPGGLFNMNQLLANEIKLLVD

SEQ ID NO: 357 - protein, 41 aa, Homo sapiens
MSKVSFKITLTSDPRLPYKVLSVPESTPFTAVLKFAAEEME

SEQ ID NO: 358 - protein, 295 aa, Homo sapiens
MMAKKPPKPAPRRIFQERLKITALPLYFEGFLLIKRSGYREYEHYWTELRGTTLFFYTDKKSIIYVDKLDIVDLTCLTEQNSTEKNCAKFTLVLPKEEVQLKTENTESGEEWRGFILTVTELSVPQNVSLLPGQVIKLHEVLEREKKRRIETEQSTSVEKEKEPTEDYVDVLNPMPACFYTVSRKEATEMLQKNPSLGNMILRPGSDSRNYSITIRQEIDIPRIKHYKVMSVGQNYTIELEKPVTLPNLFSVIDYFVKETRGNLRPFICSTDENTGQEPSMEGRSEKLKKNPHIA

SEQ ID NO: 359 - protein, 767 aa, Homo sapiens
MARGSLGVSPRAPLAAPRFSQCGMWRVCAFQTRSRLECCVCLRSEPVGYTGSDGRGHRPHSPAVALMVQSRVWQWRVPLVTKNVLRLGTGVRGRPCTRFGEIKSPAAAINTLQFEYALCLGRVQRPGHDFCVPAERGVTEDVRGCFRPEGQDMLALLLVGRLSCPQPGLSAPVTVSPRDCPTIPWWRGTGLLDLFTAVPPALSPVPGWAEEQERLRLEQEREQEQKKANSLARLAHTLPVEEPRMEAPPLPLSPPAPPPAPPPPLATPAPLTVIPIPVVTNSPQPLPPPPPLPAAAQPLPLAPRQPALVGAPGLSIKEPAPLPSRPQVPTPAPLLPDSKATIPPNGSPKPLQPLPTPVLTIAPHPGVQPQLAPQQPPPPTLGTLKLAPAEEVKSSEQKKRPGGIGTREVHNKLEKNRRAHLKECFETLKRNIPNVDDKKTSNLSVLRTALRYIQSLKRKEKEYEHEMERLAREKIATQQRLAELKHELSQWMDVLEIDRVLRQTGQPEDDQASTSTASEGEDNIDEDMEEDRAGLGPPKLSHRPQPELLKSTLPPPSTTPAPLPPHPHPHPHSVALPPAHLPVQQQQPQQKTPLPAPPPPPAAPAQTLVPAPAHLVATAGGGSTVIAHTATTHASVIQTVNHVLQGPGGKHIAHIAPSAPSPAVQLAPATPPIGHITVHPATLNHVAHLGSQLPLYPQPVAVSHIAHTLSHQQVNGTAGLGPPATVMAKPAVGAQVVHHPQLVGQTVLNPVTMVTMPSFPVSTLKLA

SEQ ID NO: 360 - protein, 69 aa, Homo sapiens
MAQDLSEKDLLKMEVEQLKKEVKNTRIPISKAGKEIKEYVEAQAGNDPFLKGIPEDKNPFKEKGGCLIS

SEQ ID NO: 361 - protein, 418 aa, Homo sapiens
MRLNSSAPGTPGTPAADPFQRAQAGLEEALLAPGFGNASGNASERVLAAPSSELDVNTDIYSKVLVTAVYLALFVVGTVGNTVTAFTLARKKSLQSLQSTVHYHLGSLALSDLLTLLLAMPVELYNFIWVHHPWAFGDAGCRGYYFLRDACTYATALNVASLSVERYLAICHPFKAKTLMSRSRTKKFISAIWLASALLTVPMLFTMGEQNRSADGQHAGGLVCTPTIHTATVKVVIQVNTFMSFIFPMVVISVLNTIIANKLTVMVRQAAEQGQVCTVGGEHSTFSMAIEPGRVQALRHGVRVLRAVVIAFVVCWLPYHVRRLMFCYISDEQWTPFLYDFYHYFYMVTNALFYVSSTINPILYNLVSANFRHIFLATLACLCPVWRRRRKRPAFSRKADSVSSNHTLSSNATRETLY

SEQ ID NO: 362 - protein, 157 aa, Homo sapiens
MPKKAGATTKGKSQSKEPERPLPPLGPVAVDPKGCVTIAIHAKPGSKQNAVTDLTAEAVNVAIAAPPSEGEANAELCRYLSKVLELRKSDVVLDKGLSLCHPGWSTAAQPRVTAALTSLAQTILPPQPPKLLELQVHATHTRLIFVFFEETGSRHVA

SEQ ID NO: 363 - protein, 51 aa, Homo sapiens
MSGPLSPVCSCPQLPFMLSPCHMHHHPGHVALSQTVSPASLLTQGLGLPQH

SEQ ID NO: 364 - protein, 189 aa, Homo sapiens
MLGITSCSDQQAKEGEGLEGSSTGSSSGNHGGSGGGNGHKPGCEKPGNEARGSGESGIQNSETSPGMFNFDTFWKNFKSKLGFINWDAINKNQVPPPSTRALLYFSRLWEDFKQNTPFLNWKAIIEGADASSLQKRAGRADQNYNYNQHAYPTAYGGKYSVKTPAKGGVSPSSSASRVQPGLLQWVKFW

SEQ ID NO: 365 - protein, 386 aa, Homo sapiens
MTRQCQASNQQLGPQPLATTPPDLFLGFQQLFGTFASWGREPHCGGPDFPQPIQTVEDALRKPSGLQLINYIHTYLPLPAKYQIHRTFRPAPPGGVAGVLVGHPFDTVKVRLQVQSVEKPQYRGTLHCFKSIIKQESVLGLYKGLGSPLMGLTFINALVFGVQGNTLRALGHDSPLNQFLAGAAAGAIQCVICCPMELAKTRLQLQDAGPARTYKGSLDCLAQIYGHEGLRGVNRGMVSTLLRETPSFGVYFLTYDALTRALGCEPGDRLLVPKLLLAGGTSGIVSWLSTYPVDVVKSRLQADGLRGAPRYRGILDCVHQSYRAEGWRVFTRGLASTLLRAFPVNAATFATVTVVLTYARGEEAGPEGEAVPAAPAGPALAQPSSL

SEQ ID NO: 366 - protein, 578 aa, Homo sapiens
MLQDWCRRMGVNAERSLLILDIPDDCEEHEFQEAVRAALSPLGRYRVLIKVFRKELGARAALVEFAEGLNQSLIPRQIAGKGGPWKVISLPQALDAEFQDIPSFPAQPQGQAVARGAGEAGAAGEAGSVGEAGGVNEERSAGEDEAGGIGEAGGVGEAGAAGEAGAAGEAGAAGEAGGAGEAGGAGEAGGAGEEGGTGEEGGAGEAGGAGEEGGEDEAGAAGEAVGAGVVEAWTQSWRQTLRPLVKTMAYRELRPFSGREQPGCVEESFESWLEDAKDMLQLWCHASERERRRRLLDSLDGLALDIVSGLLEEDPDFSAQDCLTALGQVFRSRDTWMTSRMKFLTCTQGPQEGLFAFVVRLEGLLQKAVEKGAVHPAMANHLRLRQVLSRARPSEALQDTLRRMQLERRPPDFLRLLRLIRDMEAWAASLARSQQGVAWAAAPVESEDPAAAQASPAQGDASEADPGAEDADEAASTTKEAARVAPATGEDENAPAGLEGLGQGRSPDAPGGLPARMGSAVDMAPGGPSWEPEGLVQVGGQEAEEPPQEGLKPILEESENEDEDGAGEAGKPKSPPGK

SEQ ID NO: 367 - protein, 426 aa, Homo sapiens
MSACNISIQGPSIYNKEPKNIINPHEKVQMKSICANSPIKAQQDQLQVKNNIKASLHNVKSSLPLFNTKSSTSVGQLQSPTLNSPIYMQKQGKNEHLAFNTKSKASTVGSELVLVSTTVPTVHHVSDLEMSSTLDCLPVLADWEDVVLLPASQPEENVDCTVPISDSDLEISFNSGERLMVLKELEMSSHENFGDIEETPQKSETSKSIVYKSPHTTIYNVKEAKDPGSDISAFKLPEHKSSTFNRVNANMSHPLVLGKHPLLSGGTKRNPCSPQAFPPAKKQPFTIHEEKPTSSDCSPVRSSSWRRLPSILTSTVNLQEPWKSGKMTPPLCKCGRRSKRLVVSNNGPNHGKVFYCCPIGKYQENRKCCGYFKWEQTLQKERANSMVPSHSTGGLTFSSPETSHICDRNLSISTKNSLRLRPSMRN

SEQ ID NO: 368 - protein, 316 aa, Homo sapiens
MSNPFLKQVFNKDKTFRPKRKFEPGTQRFELHKKAQASLNAGLDLRLAVQLPPGEDLNDWVAVHVVDFFNRVNLIYGTISDGCTEQSCPVMSGGPKYEYRWQDEHKFRKPTALSAPRYMDLLMDWIEAQINNEDLFPTNVGTPFPKNFLQTVRKILSRLFRVFVHVYIHHFDRIAQMGSEAHVNTCYKHFYYFVKEFGLIDTKELEPLVRGLGAEGVRLRWRPRLELGPGDPADGTSGEVAGRDPAFSHGTNAGDRSENADSLASWGSLLPLVSERNDRPDVPLRAPRVSRCPNRRWGLGDLEEDALEPSSRFSPA

SEQ ID NO: 369 - protein, 267 aa, Homo sapiens
MLQSTRPPRTSPSPRGCWPRRPPGPPSARARRRRRRRRRLCNISVQRQMLSSLLVRWGRPRGFQCDLLLFSTNAHGRAFFAAAFHRVGPPLLIEHLGLAAGGAQQDLRLCVGCGWVRGRRTGRLRPAAAPSAAAATAGAPTALPAYPAAEPPGPLWLQGEPLHFCCLDFSLEELQGEPGWRLNRKPIESTLVACFMTLVIVVWSVAALIWPVPIIAGFLPNGMEQRRTTASTTAATPAAVPAGTTAAAAAAAAAAAAAAVTSGVATK

SEQ ID NO: 370 - protein, 164 aa, Homo sapiens
MKCKPNQTRTYDPEGFKKRAACLCFRSEREDEVLLVSSSRYPDRWIVPGGGMEPEEEPGGAAVREVYEEAGVKGKLGRLLGVFEQNQDPKHRTYVYVLTVTELLEDWEDSVSIGRKREWFKVEDAIKVLQCHKPVHAEYLEKLKLGGSPTNGNSMAPSSPDSDP

SEQ ID NO: 371 - protein, 782 aa, Homo sapiens
MMLPYPSALGDQYWEEILLPKNGENVETMKKLTQNHKAKGLPSNDTDCPQKKEGKAQIVVPVTFRDVTVIFTEAEWKRLSPEQRNLYKEVMLENYRNLLSLENFHSSAEPKPEIYTCSSCLLAFSCQQFLSQHVLQIFLGLCAENHFHPGNSSPGHWKQQGQQYSHVSCWFENAEGQERGGGSKPWSARTEERETSRAFPSPLQRQSASPRKGNMVVETEPSSAQRPNPVQLDKGLKELETLRFGAINCREYEPDHNLESNFITNPRTLLGKKPYICSDCGRSFKDRSTLIRHHRIHSMEKPYVCSECGRGFSQKSNLSRHQRTHSEEKPYLCRECGQSFRSKSILNRHQWTHSEEKPYVCSECGRGFSEKSSFIRHQRTHSGEKPYVCLECGRSFCDKSTLRKHQRIHSGEKPYVCRECGRGFSQNSDLIKHQRTHLDEKPYVCRECGRGFCDKSTLIIHERTHSGEKPYVCGECGRGFSRKSLLLVHQRTHSGEKHYVCRECRRGFSQKSNLIRHQRTHSNEKPYICRECGRGFCDKSTLIVHERTHSGEKPYVCRCMGKAFVITHHRENLHVGTLWSSAQMTFSGVTPQLLERTVLLLAEMHSRDALRSGTHSQPQGAACTTGAMHLCRGTFWPQPLTQRGQLQKVIPDPEIPIELKDHWVADTLQVPPINLIIMAIEFQHEFWRRHSHHSINYAVAPQSGLMREKDVHVWECGPPPFARTAPITPTSDQNWRPLREKKGHYQDLSTPSQKETELKRTRVSLRRKRDANSPLQDYGFGA

SEQ ID NO: 372 - protein, 685 aa, Homo sapiens
MIPGKYRSVSGRAANNVNCGLHLVIQTSSLPEKNKVEFKLNKDTSSFPGRLLQHDLERNYSSRQGDHINLVSSSLSSFPILQRSSEEKILYSDRLSLERQKLTVCPIINGEDHLRLLNFQHNFITRIQNISNLQKLISLDLYDNQIEEISGLSTLRCLRVLLLGKNRIKKISNLENLKSLDVLDLHGNQITKIENINHLCELRVLNLARNFLSHVDNLNGLDSLTELNLRHNQITFVRDVDNLPCLQHLFLSFNNISSFDSVSCLADSSSLSDTTFDGNPIAQESWYKHTVLQNMMQLRQLDMKRITEEERRMASVLAKKEEEKKRESHKQSLLKEKKRLTINNVARQWDLQQRVANIATNEDRKDSDSPQDPCQIDGSTLSAFPEETGPLDSGLNNALQGLSVIDTYLVEVDGDTLSLYGSGALESLDRNWSVQTAGMITTVSFTFIEFDEIVQVLPKLKIKFPNSLHLKFKETNLVMLQQFNALAQLRRIDQLTIDPQGNPVVNFTLWKYYVLFRLSHFSMQKINGTEVTQNDMIMAERLFGILAHVASSELPQYRLISILGDARKKQFRYLLESKGKKPGIINEENNDSKRLVGENTNRATLNYTTRDFYNEKLEEIKEKKKFCKTYIEDLVKEATEINMKNEALQKLWPQMFIELVRDAVIEIRNKNSYMKLCLQQITDQK

SEQ ID NO: 373 - protein, 137 aa, Homo sapiens
MAGVKALVALSFSGAIGLTFLMLGCALEDYGLGPTDSVYWPLFVLIFHAISPIPHFIAKRVTYDSDATSSACRELAYFFTTGIVVSAFGFPVILARVAVIKWGACGLVLAGNAVIFLTIQGFFLIFGRGDDFSWEQW

SEQ ID NO: 374 - protein, 200 aa, Homo sapiens
MGSRESVEGSGRSGGSPFLPFSWFTDSGKGSASSGSTTSPTCSPKHEGFSPKKSASQESTLSDDSTPPSSSPKIPSGPWQEAKCSYPYHTLSQSSDEFLDEPLPPVHHWTSQQVGQWLQSLNLEQYAAEFAARQVDGPQLLQLDGSKLKSLGLSNSHDRALVKRKLKEMAAAAEKERKAQEKAARQREKLRRREQEAKKS

SEQ ID NO: 375 - protein, 40 aa, Homo sapiens
MINLCICFLKGEDGEKNRKLLADIRGHKMSSSFVQMTFSC

SEQ ID NO: 376 - protein, 832 aa, Homo sapiens
MHKLNVNLPRRKVRQMFQEADTDENQGTLTFEEFCVFYKMMSLRRDLYLLLLSYSDKKDHLTVEELAQFLKVEQKMNNVTTDYCLDIIKKFEVSEENKVKNVLGIEGFTNFMRSPACDIFNPLHHEVYQDMDQPLCNYYIASSHNTYLTGDQLLSQSKVDMYARVLQEGCRCVEVDCWDGPDGEPVVHHGYTLTSKILFRDVVETINKHAFVKNEFPVILSIENHCSIQQQRKIAQYLKGIFGDKLDLSSVDTGECKQLPSPQSLKGKILVKGKKLPYHLGDDAEEGEVSDEDSADEIEDECKFKLHYSNGTTEHQVESFIRKKLESLLKESQIRDKEDPDSFTVRALLKATHEGLNAHLKQSPDVKESGKKSHGRSLMTNFGKHKKTTKSRSKSYSTDDEEDTQQSTGKEGGQLYRLGRRRKTMKLCRELSDLVVYTNSVAAQDIVDDGTTGNVLSFSETRAHQVVQQKSEQFMIYNQKQLTRIYPSAYRIDSSNFNPLPYWNAGCQLVALNYQSEGRMMQLNRAKFKANGNCGYVLKPQQMCKGTFNPFSGDPLPANPKKQLILKVISGQQLPKPPDSMFGDRGEIIDPFVEVEIIGLPVDCCKDQTRVVDDNGFNPVWEETLTFTVHMPEIALVRFLVWDHDPIGRDFVGQRTVTFSSLVPGYRHVYLEGLTEASIFVHITINEIYGKWSPLILNPSYTILHFLGATKNRQLQGLKGLFNKNPRHSSSENNSHYVRKRSIGDRILRRTASAPAKGRKKSKMGFQEMVEIKDSVSEATRDQDGVLRRTTRSLQARPVSMPVDRNLLGALSLPVSETAKDIEGKENSLVQI

SEQ ID NO: 377 - protein, 730 aa, Homo sapiens
MPEPPPAPGSCAARASKTSAAPGSTAPSPIHRSRAEERGTTARNWQAAPTAAPVRDPLGEASWAPESANLVGIWRTFVSSSGIVNAPISTLSKRTNQLSVKQTNRLSVKWTNQQDVARGSATYREGEHGCWLLAPGGFRALQLDNCRDGVWLPDPLRQVLGEAPPLQLACRFPSGTPAASPERGPGAEKRVCGKDVSEVTHCTHDLLHATLEDSWDVSSQLDRQQENWKRHLGSEASTQKKIITPQENFEQNKFGENSRLNTNLVTQLNIPARIRPSECETLGSNLGHNADLLNENNILAKKKPYKCDKCRKAFIHRSSLTKHEKTHKGEGAFPNGTDQGIYPGKKHHECTDCGKTFLWKTQLTEHQRIHTGEKPFECNVCGKAFRHSSSLGQHENAHTGEKPYQCSLCGKAFQRSSSLVQHQRIHTGEKPYRCNLCGRSFRHGTSLTQHEVTHSGEKPFQCKECGKAFSRCSSLVQHERTHTGEKPFECSICGRAFGQSPSLYKHMRIHKRGKPYQSSNYSIDFKHSTSLTQDESTLTEVKSYHCNDCGEDFSHITDFTDHQRIHTAENPYDCEQAFSQQAISHPGEKPYQCNVCGKAFKRSTSFIEHHRIHTGEKPYECNECGEAFSRRSSLTQHERTHTGEKPYECIDCGKAFSQSSSLIQHERTHTGEKPYECNECGRAFRKKTNLHDHQRIHTGEKPYSCKECGKNFSRSSALTKHQRIHTRNKL

SEQ ID NO: 378 - protein, 133 aa, Homo sapiens
MLSPEAERVLRYLVEVEELAEEVLADKRQIVDLDTKRNQNREGLRALQKDLSLSEDVMVCFGNMFIKMPHPETKEMIEKDQDHLDKEIEKLRKQLKVKVNRLFEAQGKPELKGFNLNPLNQDELKALKVILKG

SEQ ID NO: 379 - protein, 304 aa, Homo sapiens
MAAAEHRHSSGLPYWPYLTAETLKNRMGHQPPPPTQQHSITDNSLSLKTPPECLLTPLPPSALPSAPPSADDNLKTRAECLLHPLPPSADDNLKTLSERQLTPLPPSAPPSADDNIKTPAERLRGPLPPSADDNLKTPSERQLTPLPPSAPPSADDNIKTPAERLRGPLPPSADDNLKTPSERQLTPLPPSAPPSADDNIKTPAERLRGPLPPSADDNLKTPSERQLTPLPPSAPPSADDNIKTPAERLRGPLPPSADDNLKTPSERQLTPFPPSAPPSADDNIKTPAERLRGASAGAASTLSG

SEQ ID NO: 380 - protein, 300 aa, Homo sapiens
MAAAEHRHSSGLPYWPYLTAETLKNRMGHQPPPPTQQHSITDNSLSLKTPPECLLTPLPPSAPPSADDNLKTRAECLLHPLPPSADDNLKTLSERQLTPLPPSAPPSADDNIKTPAERLRGPLPPSADDNLKTPSERQLTPLPPSAPPSADDNIKTPAERLRGPLPPSADDNLKTPSERQLTPLPPSAPPSADDNIKTPAERLRGPLPPSADDNLKTPSERQLTPLPPSAPPSADDNIKTPAERLRGPLPPSADDNLKTPSERQLTPFPPSAPPSADDNIKTPAERLRGASAGAASTLSG

SEQ ID NO: 381 - protein, 512 aa, Homo sapiens
MAAAEHRHSSGLPYWPYLTAETLKNRMGHQPPPPTQQHSITDNSLSLKTPPECLLTPLPPSALPSAPPSADDNLKTRAECLLHPLPPSADDNLKTLSERQLTPLPPSAPPSADDNIKTPAFHPQQMIISRHLPSVSSLPFHPQLHPQQMIISRHLPSVCGGRFHPQRMIISRHLPSVSSLPFHPQLHPQQMIISRHLPSVCGGRFHPQRMIISRHLPSVSSLPFHPQLHPQQMIISRHLPSVCGGRFHPQRMIISRHLPSVSSLPFHPQLHPQQMIISRHLPSVCGERLRGPLPPSADDNLKTPSERQLTPLPPSAPPSADDNIKTPAERLRGPLPPSADDNLKTPSERQLTPLPPSAPPSADDNIKTPAERLRGPLPPSADDNLKTPSERQLTPLPPSAPPSADDNIKTPAERLRGPLPPSADDNLKTPSERQLTPLPPSAPPSADDNIKTPAERLRGPLPPSADDNLKTPSERQLTPFPPSAPPSADDNIKTPAERLRGASAGAASTLSG

SEQ ID NO: 382 - protein, 514 aa, Homo sapiens
MAAAEHRHSSGLPYWPYLTAETLKNRMGHQPPPPTQQHSITDNSLSLKTPPECLLTPLPPSALPSAPPSADDNLKTRAECLLHPLPPSADDNLKTLSERQLTPLPPSAPPSADDNIKTPAERLRGPLPPSADDNLKTPSERQLTPLPPSAPPSADDNIKTPAERLRGPLPPSADDNLKTPSERQLTPLPPSAPPSADDNIKTPAERLRGPLPPSADDNLKTPSERQLTPLPPSAPPSADDNIKTPAERLRGPLPPSADDNLKTPSERQLTPFPPSAPPSADDNIKTPAERLRGPLPPSADDNLKTPSERQLTPLPPSAPPSADDNIKTPAERLRGPLPPSADDNLKTPSERQLTPLPPSAPPSADDNIKTPAERLRGPLPPSADDNLKTPSERQLTPLPPSAPPSADDNIKTPAERLRGPLPPSADDNLKTPSERQLTPLPPSAPPSADDNIKTPAERLRGPLPPSADDNLKTPSERQLTPFPPSAPPSADDNIKTPAERLRGASAGAASTLSG

SEQ ID NO: 383 - protein, 212 aa, Homo sapiens [sequence omitted]

SEQ ID NO: 384 - protein, 574 aa, Homo sapiens
MYTCDLSVKEELDVVEESHYIQQRVQKAQFLVEFESQNKEFLMEQQRTRNEGAWLREPVFPSSTKKKCPKLNKPQPQPSPLLSTHHTQEEDISSKMASVVIDDLPKEGEKQDLSSIKVNVTTLQDGKGTGSADSIATLPKGFGSVEELCTNSSLGMEKSFATKNEAVQKETLQEGPKQEALQEDPLESFNYVLSKSTKADIGPNLDQLKDDEILRHCNPWPIISITNESQNAESNVSIIEIADDLSASHSALQDAQASEAKLEEEPSASSPQYACDFNLFLEDSADNRQNFSSQSLEHVEKENSLCGSAPNSRAGFVHSKTCLSWEFSEKDDEPEEVVVKAKIRSKARRIVSDGEDEDDSFKDTSSINPFNTSLFQFSSVKQFDASTPKNDISPPGRFFSSQIPSSVNKSMNSRRSLASRRSLINMVLDHVEDMEERLDDSSEAKGPEDYPEEGVEESSGEASKYTEEDPSGETLSSENKSSWLMTSKPSALAQETSLGAPEPLSGEQLVGSPQDKAAEATNDYETLVKRGKELKECGKIQEALNCLVKALDIKSADPEVMLLTLSLYKQLNNN

SEQ ID NO: 385 - protein, 395 aa, Homo sapiens [sequence omitted]

SEQ ID NO: 386 - protein, 561 aa, Homo sapiens
MGFTTPPLDPVLQNPLPSQLVFSGLKTVQPVPPFYRSLLTPGEMVSPPTSLPTSPIIPTSGTIEQHPPPPSEPVVPAVMMATHEPSADLAPKKKPRKSSMPVKIEKEIIDTADEFDDEDDDPNDGGAVVNDMSHDNHCHSQEEMSPGMSVKDFSKHNRTRCISRTEIRRADSMTSEDQEPERDYENESESSEPKLGEESMEGDEHIHSEVSEKVLMNSERPDENHSEPSHQDVIKVKEEFTDPTYDMFYMSQYGLYNGGGASMAALHESFTSSLNYGSPQKFSPEGDLCSSPDPKICYVCKKSFKSSYSVKLHYRNVHLKEMHVCTVAGCNAAFPSRRSRDRHSANINLHRKLLTKELDDMGLDSSQPSLSKDLRDEFLVKIYGAQHPMGLDVREDASSPAGTEDSHLNGYGRGMAEDYMVLDLSTTSSLQSSSSIHSSRESDAGSDEGILLDDIDGASDSGESAHKAEAPALPGSLGAEVSGSLMFSSLSGSNGGIMCNICHKMYSNKGTLRVHYKTVHLREMHKCKVPGCNMMFSSVRSRNRHSQNPNLHKNIPFTSVD

SEQ ID NO: 387 - protein, 104 aa, Homo sapiens
MVPLSQLAYGPAVPPQTLYNPAQQILAYAGFRLTPEPVPTCSSYPLPLQPCSRFPVAPSSALASSEDLQPPSPSSSGSGLPGQAPPCYAPTYFPPGEKPPPYAP

SEQ ID NO: 388 - protein, 532 aa, Homo sapiens
MNKYIPRDCSQKGRPFHLFRLLIQYHEPELCSYLDTKKITPDSYALNWLGSLFACYCSTEVTQAIWDGYLQQADPFFIYFLMLIILVNAKEVILTQESDSKEEVIKFLENTPSSLNIEDIEDLFSLAQYYCSKTPASFRKDNHHLFGSTLLGIKDDDADLSQALCLAISVSEILQANQLQGEGVRFFVVDCRPAEQYNAGHLSTAFHLDSDLMLQNPSEFAQSVKSLLEAQKQSIESGSIAGGEHLCFMGSGREEEDMYMNMVLAHFLQKNKEYVSIASGGFMALQQHLADINVDGPENGYGHWIASTSGSRSSINSVDGESPNGSSDRGMKSLVNKMTVALKTKSVNVREKVISFIENTSTPVDRHVSSSDRVGKPYRGVKPVFSIGDEEEYDTDEIDSSSMSDDDRKEVVNIQTWINKPDVKHHFPCKEVKESGHMFPSHLLVTATHMYCLREIVSRKGLAYIQSRQALNSVVKITSKKKHPELITFKYGNSSASGIEILAIERYLIPNAGDATKAIKQQIMKVLDALES

SEQ ID NO: 389 - protein, 370 aa, Homo sapiens
MKIKDAKKPSFPWFGMDIGGTLVKLSYFEPIDITAEEEQEEVESLKSIRKYLTSNVAYGSTGIRDVHLELKDLTLFGRRGNLHFIRFPTQDLPTFIQMGRDKNFSTLQTVLCATGGGAYKFEKDFRTIGNLHLHKLDELDCLVKGLLYIDSVSFNGQAECYYFANASEPERCQKMPFNLDDPYPLLVVNIGSGVSILAVHSKDNYKRVTGTSLGGGTFLGLCSLLTGCESFEEALEMASKGDSTQADKLVRDIYGGDYERFGLPGWAVASSFGNMIYKEKRESVSKEDLARATLVTITNNIGSVARMCAVNEKINRVVFVGNFLRVNTLSMKLLAYALDYWSKGQLKALFLEHEGYFGAVGALLGLPNFS

SEQ ID NO: 390 - protein, 340 aa, Homo sapiens
MWKTTFAWHTEDMDLYSINYLHLGEPKTWYVVPPEHGQRLERLARELFPGSSRGCGAFLRHKVALISPTVLKENGIPFNRITQEAGEFMVTFPYGYHAGFNHGFNCAEAINFATPRWIDYGKMASQCSCGEARVTFSMDAFVRILQPERYDLWKRGQDRAVVDHMEPRVPASQELSTQKEVQLPRRAALGLRQLPSHWARHSPWPMAARSGTRCHTLVCSSLPRRSAVSGTATQPRAAAVHSSKKPSSTPSSTPGPSAQIIHPSNGRRGRGRPPQKLRAQELTLQTPAKRPLLAGTTCTASGPEPEPLPEDGALMDKPVPLSPGLQHPVKASGCSWAPVP

SEQ ID NO: 391 - protein, 316 aa, Homo sapiens
MDWKLEGSTQKVESPVLQGQEGILEETGEDGLPEGFQLLQIDAEGECQEGEILATGSTAWCSKNVQRKQRHWEKIVAAKKSKRKQEKERRKANRAENPGICPQHSKRFLRALTKDKLLEAKHSGPRLCIDLSMTHYMSKKELSRLAGQIRRLYGSNKKADRPFWICLTGFTTDSPLYEECVRMNDGFSSYLLDITEEDCFSLFPLETLVYLTPDSEHALEDVDLNKVYILGGLVDESIQKKVTFQKAREYSVKTARLPIQEYMVRNQNGKNYHSEILAINQVFDILSTYLETHNWPEALKKGVSSGKGYILRNSVE

SEQ ID NO: 392 - protein, 301 aa, Homo sapiens
MRDKEAGLAQAHQGCGIHAIELNPSKTLLATGGENPNSLAIYQLPTLDPLCLGDRHGHKDWIFAVAWLSDTVAVSGSRDGTVALWRMDPDMFNGSIAWHSEVGLPVYAHIRPRDVEAIPRASTNPSNRKVRALAFSGKNQELGAVSLDGYFHCDELSLYAVGSQSHVSFLDPRQRQQNIRPLCSREGGTGVRSLSFYQHIITVGTGHGSLLFYDIRAQKFLEERASSSLDSMPGPAGRKLKLACGRGWLNQDDVWVNYFGGMGEFPNALYTHCYNWPEMKLFVAGGPLPSGLHGNYAGLWS

SEQ ID NO: 393 - protein, 539 aa, Homo sapiens
MAAPASRQVRRRARAAPRPRSAEDWWWDRLAPRGSGYHLLQSDSMLLVLSEPGPARPRAQRRASRRTPRQPPRGPSAAAKPKAGLRSEAAAAPAPAPAPTPTPEEGPDAGWGDRIPLEILVQIFGLLVAADGPMPFLGRAARVCRRWQEAASQPALWHTVTLSSPLVGRPAKGGVKAEKKLLASLEWLMPNRFSQLQRLTLIHWKSQVHPVLKLVGECCPRLTFLKLSGCHGVTADALVMLAKACCQLHSLDLQHSMVESTAVVSFLEEAGSRMRKLWLTYSSQTTAILGALLGSCCPQLQVLEVSTGINRNSIPLQLPVEALQKGCPQLQVLRLLNLMWLPKPPGRGVAPGPGFPSLEELCLASSTCNFVSNEVLGRLLHGSPNLRLLDLRGCARITPAGLQDLPCRELEQLHLGLYGTSDRLTLAKEGSPFLTQKWCHTLRELDLSGQGFSEKDLEQALAAFLSTPGGSHPALCSLNLRGTRVTPSTVSSVISSCPGLLYLNLESCRCLPRGLKRAYRGLEEVQWCLEQLLTSPSPS

SEQ ID NO: 394 - protein, 239 aa, Homo sapiens
MGNSALRAHVETAQKTGVFQLKDRGLTEFPADLQKLTSNLRTIDLSNNKIESLPPLLIGKFTLLKSLSLNNNKLTVLPDEICNLKKLETLSLNNNHLRELPSTFGQLSALKTLSLSGNQLGALPPQLCSLRHLDVMDLSKNQIRSIPDSVGELQVIELNLNQNQISQISVKISCCPRLKILRLEENCLELSMLPQSILSDSQICLLAVEGNLFEIKKLRELEGYDKYMERFTATKKKFA

SEQ ID NO: 395 - protein, 181 aa, Homo sapiens
MLGRRCCVHVRKHLIACQKFPPLCACQVFDQVRTLVLCECAHADRSGGAPSLCPHAAEPRGSPAPQACGSAAKCVRCASWVLLCALSYGDTGGVGLDRYRSYYGDTGGVRLDRYRSDYGGTGGVGLDRYRSDYGDTGGVGLDRYRSDYGGTGCVGLDRYRSDYGGTGGVGLDRYWSDARAP

SEQ ID NO: 396 - protein, 617 aa, Homo sapiens
MWKVKEPHYHLFFFAFSYCWSWEPFPSEQQPCPASVLSSQQGKSISLIMEENNDSTENPQQGQGRQNAIKCGWLRKQGGFVKTWHTRWFVLKGDQLYYFKDEDETKPLGTIFLPGNKVSEHPCNEENPGKFLFEVVPGGDRDRMTANHESYLLMASTQNDMEDWVKSIRRVIWGPFGGGTVVVQQLMSVMISKHDCLFPKDAELQSKPQDGVSNNNEIQKKATMGQLQNKENNNTKDSPSRQCSWDKSESPQRSSMNNGSPTALSGSKTNSPKNSVHKLDVSRSPPLMVKKNPAFNKGSGIVTNGSFSSSNAEGLEKTQTTPNGSLQARRSSSLKVSGTKMGTHSVQNGTVRMGILNSDTLGNPTNVRNMSWLPNGYVTLRDNKQKEQAGELGQHNRLSTYDNVHQQFSMMNLDDKQSIDSATWSTSSCEISLPENSNSCRSSTTTCPEQDFFGGNFEDPVLDGPPQDDLSHPRDYESKSDHRSVGGRSSRATSSSDNSETFVGNSSSNHSALHSLVSSLKQEMTKQKIEYESRIKSLEQRNLTLETEMMSLHDELDQERKKFTMIEIKMRNAERAKEDAEKRNDMLQKEMEQFFSTFGELTVEPRRTERGNTIWIQ

SEQ ID NO: 397 - protein, 401 aa, Homo sapiens
MKENFKHRHVVAFISSQEAQEDSREEEDRLESRFYFLFLLELSYKTTGLNREPTVSLNSKSGTPMDQNEHSHWGPHAKGQCASRSELRIILVGKTGTGKSAAGNSILRKQAFESKLGSQTLTKTCSKSQGSWGNREIVIIDTPDMFSWKDHCEALYKEVQRCYLLSAPGPHVLLLVTQLGRYTSQDQQAAQRVKEIFGEDAMGHTIVLFTHKEDLNGGSLMDYMHDSDNKALSKLVAACGGRICAFNNRAEGSNQDDQVKELMDCIEDLLMEKNGDHYTNGLYSLIQRSKCGPVGSDERVKEFKQSLIKYMETQRSYTALAEANCLKGALIKTQLCVLFCIQLFLRLIILWLCILHSMCNLFCCLLFSMCNLFCSLLFIIPKKLMIFLRTVIRLERKTPRL

SEQ ID NO: 398 - protein, 581 aa, Homo sapiens [sequence omitted]

SEQ ID NO: 399 - protein, 167 aa, Homo sapiens
MGVKRSLQSGGILLSLVANVLMVLSTATNYWTRQQEGHSGLWQECNHGICSSIPCQTTLAVTVACMVLAVGVGVVGMVMGLRIRCDEGESLRGQTTSAFLFLGGLLLLTALIGYTVKNAWKNNVFFSWSYFSGWLALPFSILAGFCFLLADMIMQSTDAISGFPVCL

SEQ ID NO: 400 - protein, 684 aa, Homo sapiens
MWVLLRSGYPLRILLPLRGEWMGRRGLPRNLAPGPPRRRYRKETLQALDMPVLPVTATEIRQYLRGHGIPFQDGHSCLRALSPFAESSQLKGQTGVTTSFSLFIDKTTGHFLCMTSLAEGSWEDFQASVEGRGDGAREGFLLSKAPEFEDSEEVRRIWNRAIPLWELPDQEEVQLADTMFGLTKVTDDTLKRFSVRYLRPARSLVFPWFSPGGSGLRGLKLLEAKCQGDGVSYEETTIPRPSAYHNLFGLPLISRRDAEVVLTSRELDSLALNQSTGLPTLTLPRGTTCLPPALLPYLEQFRRIVFWLGDDLRSWEAAKLFARKLNPKRCFLVRPGDQQPRPLEALNGGFNLSRILRTALPAWHKSIVSFRQLREEVLGELSNVEQAAGLRWSRFPDLNRILKGHRKGELTVFTGPTGSGKTTFISEYALDLCSQGVNTLWGSFEISNVRLARVMLTQFAEGRLEDQLDKYDHWADRFEDLPLYFMTFHGQQSIRTVIDTMQHAVYVYDICHVIIDNLQFMMGHEQLSTDRIAAQDYIIGVFRKFATDNNCHVTLVIHPRKEDDDKELQTASIFGSAKASQEADNVLILQDRKLVTGPGKRYLQVSKNRFDGDVGVFPLEFNKNSLTFSIPPKNKARLKKIKDDTGPVAKKPSSGKKGATTQNSEICSGQAPTPDQPDTSKRSK

SEQ ID NO: 401 - protein, 485 aa, Homo sapiens
MAEGTAEAPLENGGGGDSGAGALERGVAPIKRQYLTTKEQFHQFLEAKGQEKTCRETEVGDPAGNELAEPEAKRIRLEDGQTADGQTEEAAEPGEQLQTQKRARGQNKGRPHVKPTNYDKNRLCPSLIQESAAKCFFGDRCRFLHDVGRYLETKPADLGPRCVLFETFGRCPYGVTCRFAGAHLRPEGQNLEQEELAARGTQPPSIRNGLDKALQQQLRKREVRFERAEQALRRFSQGPTPAAAVPEGTAAEGAPRQENCGAQQVPAGPGTSTPPSSPVRTCGPLTDEDVVRLRPCEKKRLDIRGKLYLAPLTTCGNLPFRRICKRFGADVTCGEMAVCTNLLQGQMSEWALLKRHQCEDIFGVQLEGAFPDTMTKCAELLSRTVEVDFVDINVGCPIDLVYKKGGGCALMNRSTKFQQIVRGMNQVLDVPLTVKIRTGVQERVNLAHRLLPELRDWGVALVTEMGTSCHLRMPTAPCRLVSPGS

SEQ ID NO: 402 - protein, 672 aa, Homo sapiens
MDLILNRMDYLQVGVTSQKTMKLIPASRHRATQKVVIGDHDGVVMCFGMKKGEAAAVFKTLPGPKIARLELGGVINTPQEKIFIAAASEIRGFTKRGKQFLSFETNLTESIKAMHISGSDLFLSASYIYNHYCDCKDQHYYLSGDKINDVICLPVERLSRITPVLACQDRVLRVLQGSDVMYAVEVPGPPTVLALHNGNGGDSGEDLLFGTSDGKLALIQITTSKPVRKWEIQNEKKRGGILCIDSFDIVGDGVKDLLVGRDDGMVEVYSFDNANEPVLRFDQMLSESVTSIQGGCVGKDSYDEIVVSTYSGWVTGLTTEPIHKESGPGEELKINQEMQNKISSLRNELEHLQYKVLQERENYQQSSQSSKAKSAVPSFGINDKFTLNKDDASYSLILEVQTAIDNVLIQSDVPIDLLDVDKNSAVVSFSSCDSESNDNFLLATYRCQADTTRLELKIRSIEGQYGTLQAYVTPRIQPKTCQVRQYHIKPLSLHQRTHFIDHDRPMNTLTLTGQFSFAEVHSWVVFCLPEVPEKPPAGECVTFYFQNTFLDTQLESTYRKGEGVFKSDNISTISILKDVLSKEATKRKINLNISYEINEVSVKHTLKLIHPKLEYQLLLAKKVQLIDALKELQIHEGNTNFLIPEYHCILEEADHLQEEYKKQPAHLERLYG

SEQ ID NO: 403 - protein, 215 aa, Homo sapiens
MGLEKPQSKLEGGMHPQLIPSVIAVVFILLLGVCFIASCLVTHHNFSRCKRGTGVHKLEHHAKLKCIKEKSELKSAEGSTWNCCPIDWRAFQSNCYFPLTDNKTWAESERNCSGMGAHLMTISTEAEQNFIIQFLDRRLSYFLGLRDENAKGQWRWVDQTPFNPRRVFWHKNEPDNSQGENCVVLVYNQDKWAWNDVPCNFEASRICKIPGTTLN

SEQ ID NO: 404 - protein, 71 aa, Homo sapiens
MCSYVSSMCMCVCIYTYVCTGIYTCIYYLYIHTCCLIHVYSHVYIHVYMYITFIHIHFLYVNSDSQWWHYK

SEQ ID NO: 405 - protein, 586 aa, Homo sapiens
MSSPSLSDLGKREPAVAADERGTQQRRAYANATWNSIHNGVIAVFQRKGLPDQELFSLNEGVRQLLKTELGSFFTEYLQNQLLTKGMVILRDKIRFYEELQRDKAAAAAVLGAVRKRPSVVPMAGQDPALSTSHPFYDVARHGILQVAGDDRFGRRVVTFSCCRMPPSHELDHQRLLEYLKYTLDQYVENDYTIVYFHYGLNSRNKPSLGWLQSAYKEFDRKDGDLTMWPRLVSNSKLKRSSHLSLPKYWDYRYKKNLKALYVVHPTSFIKVLWNILKPLISHKFGKKVIYFNYLSELHEHLKYDQLVIPPEVLRYDEKLQSLHEGRTPPPTKTPPPRPPLPTQQFGVSLQYLKDKNQGELIPPVLRFTVTYLREKGLRTEGLFRRSASVQTVREIQRLYNQGKPVNFDDYGDIHIPAVILKTFLRELPQPLLTFQAYEQILGITCVESSLRVTGCRQILRSLPEHNYVVLRYLMGFLHAVSRESIFNKMNSSNLACVFGLNLIWPSQGVSSLSALVPLNMFTELLIEYYEKIFSTPEAPGEHGLAPWEQGSRAAPLQEAVPRTQATGLTKPTLPPSPLMAARRRL

SEQ ID NO: 406 - protein, 555 aa, Homo sapiens
MSSPSLSDLGKREPAVAADERGTQQRRAYANATWNSIHNGVIAVFQRKGLPDQELFSLNEGVRQLLKTELGSFFTEYLQNQLLTKGMVILRDKIRFYEELQRDKAAAAAVLGAVRKRPSVVPMAGQDPALSTSHPFYDVARHGILQVAGDDRFGRRVVTFSCCRMPPSHELDHQRLLEYLKYTLDQYVENDYTIVYFHYGLNSRNKPSLGWLQSAYKEFDRKYKKNLKALYVVHPTSFIKVLWNILKPLISHKFGKKVIYFNYLSELHEHLKYDQLVIPPEVLRYDEKLQSLHEGRTPPPTKTPPPRPPLPTQQFGVSLQYLKDKNQGELIPPVLRFTVTYLREKGLRTEGLFRRSASVQTVREIQRLYNQGKPVNFDDYGDIHIPAVILKTFLRELPQPLLTFQAYEQILGITCVESSLRVTGCRQILRSLPEHNYVVLRYLMGFLHAVSRESIFNKMNSSNLACVFGLNLIWPSQGVSSLSALVPLNMFTELLIEYYEKIFSTPEAPGEHGLAPWEQGSRAAPLQEAVPRTQATGLTKPTLPPSPLMAARRRL

SEQ ID NO: 407 - protein, 139 aa, Homo sapiens [sequence omitted]

SEQ ID NO: 408 - protein, 121 aa, Homo sapiens
MKKHLTTFLVILWLYFYRGNGKNQVEQSPQSLIILEGKNCTLQCNYTVSPFSNLRWYKQDTGRGPVSLTIMTFSENTKSNGRYTATLDADTKQSSLHITASQLSDSASYICVVSALCSTGT

SEQ ID NO: 409 - protein, 58 aa, Homo sapiens
MDHTGAIDTEDEVGPLAHLAPSPQSEAVAHEFQELSLQSSQNLPPLNERKNVNIPPCY

SEQ ID NO: 410 - protein, 88 aa, Homo sapiens [sequence omitted]

SEQ ID NO: 411 - protein, 203 aa, Homo sapiens [sequence omitted]

SEQ ID NO: 412 - protein, 314 aa, Homo sapiens
MGCRCCKIIQSYLFDPVQVPSPGYVNEVNSCKLDEDDTDKLKGKWSSEVLVQKNDPQRQGSKKTESSSRTADPWEPCWPHQGPLPQGDAGGEHHACGVNGIGPAATPQPTGNSSPTQDDRGSWASTANTVPPTQPFLEGGGTRKQDCVLLASEGTQVMRNGDSRAPSEAESFALEVQDHVFQIPAPDYLQHWGPAGDNVDHNEKDCVFKNHTEDESLEGIQPPVGEHGLNTPFSVRRSWDSLNEDVETEVLSICFNEKGPVHAMPVVDSGNRQEDTHGSDGDGDGEIVDEDAAVAEALAALEAATAGEDLDETD

SEQ ID NO: 413 - protein, 439 aa, Homo sapiens
MLTGVTDGIFCCLLGTPPNAVGPLESVESSDGYTFVEVKPGRVLRVKHAGPAPAAAPPPPSSASSDAAQGDLSGLVRCQRRITVYRNGRLLVENLGRAPRADLLHGQNGSGEPPAALEVELADPAGSDGRLAPGSAGSGSGSGSGGRRRRARRPKRTIHIDCEKRITSCKGAQADVVLFFIHGVGGSLAIWKEQLDFFVRLGYEVVAPDLAGHGASSAPQVAAAYTFYALAEDMRAIFKRYAKKRNVLIGHSYGVSFCTFLAHEYPDLVHKVIMINGGGPTALEPSFCSIFNMPTCVLHCLSPCLAWSFLKAGFARQGAKEKQLLKEGNAFNVSSFVLRAMMSGQYWPEGDEVYHAELTVPVLLVHGMHDKFVPVEEDQRMAEILLLAFLKLIDEGSHMVMLECPETVNTLLHEFLLWEPEPSPNGSTWMPHDTAAYQE

SEQ ID NO: 414 - protein, 355 aa, Homo sapiens
MSVNYAAGLSPYADKGKCGLPEIFDPPEELERKVWELARLVWQSSSVVFHTGAGISTASGIPDFRGPHGVWTMEERGLAPKFDTTFESARPTQTHMALVQLERVGLLRFLVSQNVDGLHVRSGFPRDKLAELHGNMFVEECAKCKTQYVRDTVVGTMGLKATGRLCTVAKARGLRACRGELRDTILDWEDSLPDRDLALADEASRNADLSITLGTSLQIRPSGNLPLATKRRGGRLVIVNLQPTKHDRHADLRIHGYVDEVMTRLMEHLGLEIPAWDGPRVLERALPPLPRPPTPKLEPKEESPTRINGSIPAGPKQEPCAQHNGSEPASPKRERPTSPAPHRPPKRVKAKAVPS

SEQ ID NO: 415 - protein, 268 aa, Homo sapiens
MSGKANASKKNAQQLKRNPKRKKDNEEVVLSENKVRNTVKKNKNHLKDLSSEGQTKHTNLKHGKTAASKRKTWQPLSKSTRDHLQTMMESVIMTILSNSIKEKEEIQYHLNFLKKRLLQQCETLKVPPKKMEDLTNVSSLLNMERARDKANEEGLALLQEEIDKMVETTELMTGNIQSLKNKIQILASEVEEEEERVKQMHQINSSGVLSLPELSQKTLKAPTLQKEILALIPNQNALLKDLDILHNSSQMKSMSTFIEEAYKKLDAS

SEQ ID NO: 416 - protein, 652 aa, Homo sapiens [sequence omitted]

SEQ ID NO: 417 - protein, 263 aa, Homo sapiens
MAFLWLVSCFALVGATFGCGVPAIQPVLTGLSRIVNGEDAIPGSWPWQVSLQDRTGFHFCGGSLISENWVVTAAHCGVKTTDVVVAGEFDQGSDEENVQVLKIAQVFKNPKFNSFTVRNDITLLKLATPAQFSETVSAVCLPTVDDDFPAGTLCATTGWGKTKYNALKTPDKLQQAALPIVSEAKCKESWGSKITDVMICAGPSGVSSCMGDSGGPLVCQKDGVWTLAGIVSWGSGFCSTSTPAVYARVTALMPWVQEILEAN

SEQ ID NO: 418 - protein, 264 aa, Homo sapiens
MHCIWHKQMVSSYFFYQKKNELSNFEEVFLKTASGMFFSTVGCHPTRCGEFEKNNPDLYLKELLNLAENNKGKVVAVGECGLDFDRLHFCPKDTQLKYCEKQFELSEQTKLPMFLHCRNSHAEFLDIIKRNRDRCVGGVVHSFDGTKEAAAALIDLDLYIGFNGCSLKTEANLEVLKSIPSEKLMIETDAPWCGVKSTHAGSKYIRTAFPTKKKWESGHCLKDRNEPCHIIQILEIMSAVRDEDPLELANTLYNNTIKVFFPGI

SEQ ID NO: 419 - protein, 136 aa, Homo sapiens
MRRVFKIQLHTWIVDMEGAPGTLYEGEKFQLLFKFSSRYPFDSSQVMFTGENIPVHPHVYSNGHICLSILTEDWSPALSVQSVCLSIISMLSSCKEKRRPPDNSFYVRTCNKNPKKTKWWYHGKFEHRDIHKGKKM

SEQ ID NO: 420 - protein, 260 aa, Homo sapiens
MSLQKTPPTRVFVELVPWADRSRENNLASGRETLPGLRHPLSSTQAQTATREVQVSGTSEVSAGPDRAQVVVRVSSTKEAAAEAKKSVCRRLDYITQSLQQQGVQAENITVTKDFRRVENAYHMEAEVCITFTEFGKMQNICNFLVEKLDSSVVISPPQFYHTPGSVENLRRQACLVAVENAWRKAQEVCNLVGQTLGKPLLIKEEETKEWEGQIDDHQSSRLSSSLTVQQKIKSATIHAASKVFITFEVKGKEKRKKHL

SEQ ID NO: 421 - protein, 180 aa, Homo sapiens
MITETAAEPTVPAVPAAEEATEARGREEPAWPWKDAPIRTLVQRIHQLQAERAQGFRRLEEWLAPVQGLRAWGRGLRVPTCRRGHRQYLRSGPDYDFARYRSTVHGVDPGLRRRLAGGAGGGSRAGRASQAAAARRPRAQPAGAGADAAGHGGPAAVDGDARAGGAGGRCTDAAAENEGN

SEQ ID NO: 422 - protein, 158 aa, Homo sapiens
MITETAAEPTVPAVPAAEEATEARGREEPAWPWKDAPIRTLVQRIHQLQAERAQGFRRLEEGHRQYLRSGPDYDFARYRSTVHGVDPGLRRRLAGGAGGGSRAGRASQAAAARRPRAQPAGAGADAAGHGGPAAVDGDARAGGAGGRCTDAAAENEGN

SEQ ID NO: 423 - protein, 542 aa, Homo sapiens
MQKHLKNHVKKIQRQQIAAAQQDDQEVTALEEINCSSSSISFENGNSDSKDLEVETLTASSEGNKEVIPEHVAEFIEIPISVPEDVIENVIENGSPNNSLNNVFKPLTECGDDYEEEEDEEGDYEEDDYDLNQETSVIHKINGTVCHPKDIYATDQEGNFKCPALGCVRIFKRIGFLNKHAMTVHPTDLNVRQTVMKWSKGKCKFCQRQFEDSQHFIDQLNRHSYPNVYFCLHFNCNESFKLPFQLAQHTKSHRTFQAQCSFPECHELFEDLPLLYEHEAQHYLSKTPESSAQPSETILWDVQTDSNPNQEKDSSSNEKQTISLPVSTSKSRKESTEPKTCIESMEKKTDSLVQNGNERSDDTVSNISLIDQKMPDIEPNSENNCSSSDIVNGHSEIEQTPLVSSDPALKIDTNRIRTENGSILPSVVPQEHNTLPVSQAPSKPNLTSEHTSYGLILTKPYVRPLPPSYLDERYLSMPKRRKFLTDRVDACSDQDNVYKKSVKRLRCGKCLTTYCNAEALEAHLAQKKCQTLFGFDSDDESA

SEQ ID NO: 424 - protein, 227 aa, Homo sapiens
MACTKTLQQSQPISAGATTTTTAVAPAGGHSGSTECDLECLVCREPYSCPRLPKLLACQHAFCAICLKLLLCVQDNTWSITCPLCRKVTAVPGGLICSLRDHEAVVGQLAQPCTEVSLCPQGLVDPADLAAGHPSLVGEDGQDEVSANHVAARRLAAHLLLLALLIILIGPFIYPGVLRWVLTFIIALALLMSTLFCCLPSTRGSCWPSSRTLFCREQKHSHISSIA

SEQ ID NO: 425 - protein, 448 aa, Homo sapiens
MRENVVVSNMERESGKPVAVVAVVTEPWFTQRYREYLQRQKLFDTQHRVEKMPDGSVALPVLGETLPEQHLQELRNRVAPGSPCMLTQLPDPVPSKRAQGCSPAQKLCLEVSRWVEGRGVKWSAELEADLPRSWQRHGNLLLLSEDCFQAKQWKNLGPELWETVALALGVQRLAKRGRVSPDGTRTPAVTLLLGDHGWVEHVDNGIRYKFDVTQCMFSFGNITEKLRVASLSCAGEVLVDLYAGIGYFTLPFLVHAGAAFVHACEWNPHAVVALRNNLEINGVADRCQIHFGDNRKLKLSNIADRVILGLIPSSEEGWPIACQVLRQDAGGILHIHQNVESFPGKNLQALGVSKVEKEHWLYPQQITTNQWKNGATRDSRGKMLSPATKPEWQRWAESAETRIATLLQQVHGKPWKTQILHIQPVKSYAPHVDHIVLDLECCPCPSVG

SEQ ID NO: 426 - protein, 672 aa, Homo sapiens
MGVGRLDMYVLHPPSAGAERTLASVCALLVWHPAGPGEKVVRVLFPGCTPPACLLDGLVRLQHLRFLREPVVTPQDLEGPGRAESKESVGSRDSSKREGLLATHPRPGQERPGVARKEPARAEAPRKTEKEAKTPRELKKDPKPSVSRTQPREVRRAASSVPNLKKTNAQAAPKPRKAPSTSHSGFPPVANGPRSPPSLRCGEASPPSAACGSPASQLVATPSLELGPIPAGEEKALELPLAASSIPRPRTPSPESHRSPAEGSERLSLSPLRGGEAGPDASPTVTTPTVTTPSLPAEVGSPHSTEVDESLSVSFEQVLPPSAPTSEAGLSLPLRGPRARRSASPHDVDLCLVSPCEFEHRKAVPMAPAPASPGSSNDSSARSQERAGGLGAEETPPTSVSESLPTLSDSDPVPLAPGAADSDEDTEGFGVPRHDPLPDPLKVPPPLPDPSSICMVDPEMLPPKTARQTENVSRTRKPLARPNSRAAAPKATPVAAAKTKGLAGGDRASRPLSARSEPSEKGGRAPLSRKSSTPKTATRGPSGSASSRPGVSATPPKSPVYLDLAYLPSGSSAHLVDEEFFQRVRALCYVISGQDQRKEEGMRAVLDALLASKQHWDRDLQVTLIPTFDSVAMHTWYAETHARHQALGITVLGSNSMVSMQDDAFPACKVEF

SEQ ID NO: 427 - protein, 941 aa, Homo sapiens
MYQGEFGLNMKLGYGKFSWPTGESYHGQFYRDHCHGLGTYMWPDGSSFTGTFYLSHREGYGTMYMKTRLFQGLYKADQRFGPGVETYPDGSQDVGLWFREQLIKLCTQIPSGFSLLRYPEFSSFITHSPARISLSEEEKTEWGLQEGQDPFFYDYKRFLLNDNLTLPPEMYVYSTNSDHLPMTSSFRKELDARIFLNEIPPFVEDGEPWFIINETPLLVKIQKQTYKFRNKPAHTSWNMGAILEGKRSGFAPCGPKEQLSMEMILKAEEGNHEWICRILKDNFASADVADAKGYTVLAAAATHCHNDIVNLLLDCGADVNKCSDEGLTALSMCFLLHYPAQSFKPNVAERTIPEPQEPPKFPVVPILSSSFMDTNLESLYYEVNVPSQGSYELRPPPAPLLLPRVSGSHEGGHFQDTGQCGGSMDHRSSSLKGDSPLVKGSLGHVESGLEDVLGNTDRGSLCSAETKFESNVCVCDFSIELSQAMLERSAQSHSLLKMASPSPCTSSFDKGTMRRMALSMIERRKRWRTIKLLLRRGADPNLCCVPMQVLFLAVKAGDVDGVRLLLEHGARTDICFPPQLSTLTPLHIAAALPGEEGVQIVELLLHAITDVDAKASDEDDTYKPGKLDLLPSSLKLSNEPGPPQAYYSTDTALPEEGGRTALHMACEREDDNKCARDIVRLLLSHGANPNLLWSGHSPLSLSIASGNELVVKELLTQGADPNLPLTKGLGSALCVACDLTYEHQRNMDSKLALIDRLISHGADILKPVMLRQGEKEAVGTAVDYGYFRFFQDRRIARCPFHTLMPAERETFLARKRLLEYMGLQLRQAVFAKESQWDPTWLYLCKRAELIPSHRMKKKGPSLPRGLDVKEQGQIPFFKFCYQCGRSIGVRLLPCPRCYGILTCSKYCKTKAWTEFHKKDCGDLVAIVTQLEQVSRRREEFQ

SEQ ID NO: 428 - protein, 1359 aa, Homo sapiens
MRRNIRKLLREDQLEPVTKAAQQEELERRKRLEQQRKDYAAPIPTVPLEFLPEEIALRASDGPQLPPRVLAQEVICLDSSSGSEDEKSSRDEVIELSSGEEDTLHIVDSSESVSEDDEEEEKGGTHVNDVLNQRDALGRVLVNLNHPPEEENVFLAPQLARAVKPHQIGGIRFLYDNLVESLERFKTSSGFGCILAHSMGLGKTLQVISFIDVLFRHTPAKTVLAIVPVNTLQNWLAEFNMWLPPPEALPADNKPEEVQPRFFKVHILNDEHKTMASRAKVMADWVSEGGVLLMGYEMYRLLTLKKSFATGRPKKTKKRSHPVIIDLDEEDRQQEFRREFEKALCRPGPDVVICDEGHRIKNCQASTSQALKNIRSRRRVVLTGYPLQNNLIEYWCMVDFVRPDFLGTRQEFSNMFERPILNGQCIDSTPQDVRLMRYRSHVLHSLLEGFVQRRGHTVLKIHLPAKEENVILVRLSKIQRDLYTQFMDRFRDCGSSGWLGLNPLKAFCVCCKIWNHPDVLYEALQKESLANEQDLDVEELGSAGTSARCPPQGTKGKGEDSTLASSMGEATNSKFLQGVGFNPFQERGNNIVTYEWAKDLLTNYQTGVLENSPKMVLLFHLIEESVKLGDKILVFSQSLSTLALIEEFLGKREVPCPPGTEGQGAQKWVRNISYFRLDGSTPAFERERLINQFNDPSNLTTWLFLLSTRAGCLGVNLIGANRVVVFDASWNPCHDAQAVCRVYRYGQKKPCYIYRLVADYTLEKKIYDRQISKQGMSDRVVDDLNPMLNFTRKEVENLLHFVEKEPAPQVSLNVKGIKESVLQLACLKYPHLITKEPFEHESLLLNRKDHKLTKAEKKAAKKSYEEDKRTSVPYTRPSYAQYYPASDQSLTSIPAFSQRNWQPTLKGDEKPVASVRPVQSTPIPMMPRHVPLGGSVSSASSTNPSMNFPINYLQRAGVLVQKVVTTTDIVIPGLNSSTDVQARINAGESIHIIRGTKGTYIRTSDGRIFAVRATGKPKVPEDGRMAASGSQGPSCESTSNGRHSASSPKAPDPEGLARPVSPDSPEIISELQQYADVAAARESRQSSPSTNAALPGPPAQLMDSSAVPGTALGTEPRLGGHCLNSSLLVTGQPCGDRHPVLDLRGHKRKLATPPAAQESSRRRSRKGHLPAPVQPYEHGYPVSGGFAMPPVSLNHNLTTPFTSQAGENSLFMGSTPSYYQLSNLLADARLVFPVTTDPLVPAGPVSSSSTATSVTASNPSFMLNPSVPGILPSYSLPFSQPLLSEPRMFAPFPSPVLPSNLSRGMSIYPGYMSPHAGYPAGGLLRSQVPPFDSHEVAEVGFSSNDDEDKDDDVIEVTGK

SEQ ID NO: 429 - protein, 224 aa, Homo sapiens
MGLRDWLRTVCCCCRCECLEERALPEKEPLVSDNNPYSSFGATLVRDDEKNLWSMPHDVSHTEADDDRTLYNLIVIRNQQAKDSEEWQKLNYDIHTLRQVRREVRNRWKCILEDLGFQKEADSLLSVTKLSTISDSKNTRKAREMLLKLAEETSIFPTSWELSERYLFVVDRLIALDAAEEFFKLARRTYPKKPGVPCLADGQKELHLWGDLSCRLAHMQGVLH

SEQ ID NO: 430 - protein, 497 aa, Homo sapiens
MADPEVVVSSCSSHEEENRCNFNQQTSPSEELLLEDQMRRKLKFFFMNPCEKFWARGRKPWKLAIQILKIAMVTIQYLQLYNVSVGNHAYENKGTKQSAMAICQHFYKRGNIYPGNDTFDIDPEIETECFFVEPDEPFHIGTPAENKLNLTLDFHRLLTVELQFKLKAINLQTVRHQELPDCYDFTLTITFDNKAHSGRIKISLDNDISIRECKDWHVSGSIQKNTHYMMIFDAFVILTCLVSLILCIRSVIRGLQLQQEFVNFFLLHYKKEVSVSDQMEFVNGWYIMIIISDILTIIGSILKMEIQAKSLTSYDVCSILLGTSTMLVWLGVIRYLGFFAKYNLLILTLQAALPNVIRFCCCAAMIYLGYCFCGWIVLGPYHDKFRSLNMVSECLFSLINGDDMFATFAKMQQKSYLVWLFSRIYLYSFISLFIYMILSLFIALITDTYETIKQYQQDGFPETELRTFISECKDLPNSGKYRLEDDPPVSLFCCCKK

SEQ ID NO: 431 - protein, 183 aa, Homo sapiens
MATPRPCADGPCCSHPSAVLGVQQTLEEMDFERGIWSAALNGDLGRVKHLIQKAEDPSQPDSAGYTALHYASRNGHYAVCQFLLESGAKCDAQTHGGATALHRASYCGHTEIARLLLSHGSNPRVVDDDGMTSLHKAAERGHGDICSLLLQHSPALKAIRDRKARLACDLLPCNSDLRDLLSS

SEQ ID NO: 432 - protein, 115 aa, Homo sapiens
MATPRPCADGPCCSHPSAVLGVQQTLEEMDFERGIWSAALNGDLGRVKHLIQKAEDPSQPDSAGYTALAAERGHGDICSLLLQHSPALKAIRDRKARLACDLLPCNSDLRDLLSS

SEQ ID NO: 433 - DNA, 282 bp, Homo sapiens
aggcagctcctggagcagagtcggcactcttgggttaacaccacggtactcatcacaggctgcaccaacgctgcgggcctcttggtggttggcaactttcagcctcgttttaggtggagtcttctttgtccatgagagttctcagctgcaacatggggcagccctgtgtgagtgggtgtgtgtcatcgatatcctcattttctatggcaccttcagctacgagtttggggcagtctcctcagacacactggtggctgcactgcacttagcccctgggccggg

SEQ ID NO: 434 - DNA, 381 bp, Homo sapiens
acattgcagcaggcagagtatgaatttctgtcctttgtacgacagcagactcctccagggctctgtccacttgcaggaaattcagttcatgaagataagaagtttcttgacaaatacatgccccagttcatgaaacatcttcattatagaataattgatgtgagcactgttaaagaactgtgcagacgctggtatccagattgattactcaagcagacagcacacgaaatactatttttctcctaatatgctgtttccattatgacacagcagctcctttgtaagtaccaggtcatgtccatcccttggtacatatatgcatttgcttttaaaccatttcttttgtttaaataaataaataagtaaataaagctaaaaaaa

SEQ ID NO: 435 - DNA, 484 bp, Homo sapiens
agcagctgccatggatggattttgggggaacatggcgactcaagtgtggctgtgtggagtggtgtgaatgtggcaggtgtttctctccaggaattgaatccagaaatgggaactgccaatgatagtgaaaattggaaggaagtgcataagatggtggttgaaagtgcctatgaagtcatcaagctaaaaggatataccaactgggctattggattaaccagcgttatcaaccagaagctaaaggatgatgaggttgctcagctcaagaaaagtgcagataccctgtgggacataggctgtagaaatttaaaaactacaatgtgattaactcgagcctttagttttcatccatgtacatggatcacagtttgctttgatcttcttcaatatgtgaatttgggctcacagaatcaaagcctatgcttggtttaatgcttgcaatctgagctcttgaacaaataaaattaactattgtagtgtgaaa

SEQ ID NO: 436 - DNA, 607 bp, Homo sapiens
gaagaacatgtcctttgtgaatgatcttacagtcactcaggatgggaggaagatttatttcaccgattctagcagcaaatggcaaagacgagactacctgcttctggtgatggagggcacagatgacgggcgcctgctggagtatgatactgtgaccagggaagtaaaagttttattggaccagctgcggttcccgaatggagtccagctgtctcctgcagaagactttgtcctggtggcagaaacaaccatggccaggatacgaagctctttagtcaagagacggtgatgaagtttgtgccgcggtacagcctcgtcctagaactcagcgacagcggtgccttccggagaagcctgcatgatcccgatgggctggtggccacctacatcagcgaagtgcacgaacacgatgggcacctgtacctgggctctttcaggtcccccttcctctgcagactcagcctccaagctgtttagccctcccagatagctgcccctgccacgcaggccaggagtcttcacactcaggcaccaggcctggtccaggaggagctgtggacacagtcgtggttcaagtgtacacatgcacctgttagtccctgagagg

SEQ ID NO: 437 - DNA, 2423 bp, Homo sapiens
  misc_feature (1)...(2423): n = a,t,c or g
ctcatcattactccaagcttggcacgagggtctcattcatgcccagatgaaggccaatgccacgcagcctaaaggggttgtctctggtctcctacctatacccacctttcagtgtgtctgcctagaaggaaatgagtaatgacctctcacagtccctcaggttaccctcactgtctacaccttactcctcttctgtatgcttaacaccatctcaccaaaccagggcctactttatgttcctagcagtagctcacaggggtatggtgtgtttgtgtaacttttcagcaccttctctttttcctttcaatgatgcagggcaattctgcacagacttacaaactgtgcatgtaaaagtgtaaaagcatgtatcctcttattgtagtcttaaaaagctcgtggaatctagggacacagaagattctgtggcacagatttaggtacagagcaaaatactcactggaaaaatcaagtattggctagctaccacggggatttgatcctagctggcaaacgtggaactccgcaaatacttggagccattaattatgtatacttgttttattcataatttgtcatgttctgggataccaaaagtaataatggctgaacttaacaaaatttgtaacctcatcttaatatccactgatccatctcattcaatggtaacagtcaatgttttctaaaaggaacataaaaaccaacatgcacacaattgcacagttttcataaaggtctatttcattattggtgggtagcggcatttaaccagttaaatacatttaaataatgtataggtgactgcaggactgcagcaattggtatactagataaccaactagaaaccagctaacaaagaactggtctaaatacttaaaatacagctcttggttgagatcatcctttggttttggatcaaccttcctgggggggaaaaaagcctgctggctgggtcacaatgggaaatattattaagggccaaatcttctgatatcccattcccaaaaggtttcctttcagctgggattaagcctccaacttccaggggggagccaacccttgtgggcctccagcattaaatgctcttcccatctaccagaggcagaggagtgtaagttttcacaccagggcctcaggagttttgagtattagcctacttccaattaaggctagaaagtgttgacttttgcagaaaatggaagccagtgggatccaacttgatattttaggcgcaatgcccaaaacgagtgccagttgggtaccctgatgtcccaagcaaaggtttacttgaagtgtccaagatcttcacaaactttctggataaattgatccctccaaattctgtcccatcattgacatttgtggtgtagctggaaagtccccagtcctgtaagcccactgcaaagttattccttgtcagctttgatttggcactgtcaaaggtcatctggtagccagcaagccagccctcataaccaaagacagctgaaccatggattgcaggtccagcaaaatcaaagtcaacatcacaaccaatggtttatacactccctcttgtaagaagacttgaattttaccacttttctttcctgtgtttgggtgagaaaggtagtatccaatgtccagtttcaaacccttgaacaaatctggtccttcaaattgccgatttcctgttccccagaatgttaatccagtgttcccactttttctgtgaaaagtcagaccatactcaacaccacttgtaatttggtctcccaaggtccccagtaactttaccaagtgtcttgtattagatgaaccggacggttgaaaattccacgccactgcaagactttgttttcacatccagtttcaccaacccaaaaccaaatcctttgttgaaaatatctctggcagctttgccaaggtcagcatatgatggaggaatacacattggacgcgcgcaagtctgtccgtgggtcgccatggcgaggccgcgggcggaacggtgtctccttcacttcgccctccagctgctgcagctgcagcccgaccgcgagcgtgccaagcggcttcagcagctagcggagcggtggcggcggcccccctcaggacaccaccagattcccctcttcccgcggcctcgccatggcgacccacggacagacttgcgcgcgtccaatgtgtattcctccatcatatgctgaccttggcaaagctgccagagatattttcaacaaaggatttggttttggcgtggtgaaanctgatgtgaaaacaaagtcttgcagtggcgtggaattttcaacgtccgggtcatctaatacagacacttggtaagctactgggaccttggagaccatatacctgaggtgcgagcattggcagactttcacagacttgggcaacactgattgcactttgggaaatgatgtggaattggagac

SEQ ID NO: 438 - DNA, 3411 bp, Homo sapiens
atgaaactcatggaaacacttaaccagtgcataaacgctggtcatgaaatgacgaaggctatcgccattgcacagtttaatgatgacagcccggaagcgaggaaaataacccggcgctggagaataggtgaagcagcggatttagttggggtttcttctcaggctatcagagatgccgagaaagcagggcgactaccgcacccggatatggaaattcgaggacgggttgagcaacgtgttggttatacaattgaacaaattaatcatatgcgtgatgtgtttggtacgcgattgcgacgtgctgaagacgtatttccaccggtgatcggggttgctgcccataaaggtggcgtttacaaaacctcagtttctgttcatcttgctcaggatctggctctgaaggggctacgtgttttgctcgtggaaggtaacgacccccagggaacagcctcaatgtatcacggatgggtaccagatcttcatattcatgcagaagacactctcctgcctttctatcttggggaaaaggacgatgtcacttatgcaataaagcccacttgctggccggggcttgacattattccttcctgtctggctctgcaccgtattgaaactgagttaatgggcaaatttgatgaaggtaaactgcccaccgatccacacctgatgctccgactggccattgaaactgttgctcatgactatgatgtcatagttattgacagcgcgcctaacctgggtatcggcacgattaatgtcgtatgtgctgctgatgtgctgattgttcccacgcctgctgagttgtttgactacacctccgcactgcagtttttcgatatgcttcgtgatctgctcaagaacgttgatcttaaagggttcgagcctgatagtgcccacgaccctccggctgtccacctcagcaatggcccaggacaagagcctatcgctgtcatgacctttgacctcaccaagatcacaaaaacctcctcctcctttgaggttcgaacctgggacccagagggagtgattttttatggggataccaaccctaaggatgactggtttatgctgggacttcgagacggcaggcctgagatccaactgcacaatcactgggcccagcttacggtgggtgctggaccacggctggatgatgggagatggcaccaggtggaagtcaagatggagggggactctgtgctgctggaggtggatggggaggaggtgctgcgcctgagacaggtctctgggcccctgaccagcaaacgccatcccatcatgaggattgcgcttggggggctgctcttccccgcttccaaccttcggttgccgctggttcctgccctggatggctgcctgcgccgggattcctggctggacaaacaggccgagatctcagcatctgcccccactagcctcagaagctgtgatgtagaatcaaatcccgggatatttctccctccagggactcaggcagaattcaatctccgaggctcttcaggatccaagtccgtaggccctttaaggggtctagttgccgtttgcgaggccctgggactttggtcccagacagcggggatccggatggcttccgtgcggatccgagaggccaaggagggagactgtggagatatcctgaggctgattcgggagctagccgaattcgaaaaactctcggatcaggtgaagatcagtgaagaagggccctgcgtggtgggctatgggatatactatttcatctacagtacatggaagggacgcaccatttatctggaggatatctatgtgatgccagaatatcggggtcaagggattggttccaaaataatcaaaaaggtggctgaggtggccttggataagggctgctcccaattccgcctggccgtcctggactggaaccagagggccatggacttgtacaaggccctaggagcccaagatctgacggaagctgagggctggcacttcttctgctttcaaggagaggcaacgagaaagttggcaggaaactggcagagtgagagacaaattccttttggggatgtccggctaccacctccagctgactataataaggagatcacagaaggggatgaagtggaggtttattctcgagccaatgaacaggaaccttgtggctggtggctggcccgggtgcggatgatgaagggagataaagttgctcaggtcatccacaacttctccttttttaccatgtgccagttctatgtcattgaatatgctgcctgtgatgccacctacaatgaaattgttaccctggagcgacttcggccagttaatcccaatccccttgcaaccaaaggcagcttcttcaaggttaccatggctgtgcccgaggatctgagagaagcctgctccaatgaaaacgtccataaagagttcaagaaagccctgggagccaactgcatctttctcaacatcacaaacagtgagctcttcattctgtcaaccacagaagcccctgtgaagcgagcatctctgctgggtgatatgcatttccgaagcctgcgcaccaaactgctacttatgtcccgcaatgaagaagctaccaagcacctagagaattgtattcgtgtgcgtaatattgaaacaaaactcgtcactggaaaagtaggtactcaaaacacacaactgcttggtaatacgcttactggaagcactgccgccaaaggcgttggcgtactcattgaaggtttagcaaccagtaaaaatccgctaatgacattaaaacctaatgatacgaattctgtttatatagattatgaaaccgaagatgacacctccgatggggtttaccctaatcaaggtaacgtcacatcacagcctcttcatttccaggcaacattaaagcaagacgggaatattgctatcgaacccggcgaatttaaagccaccagtactttccaggcagaggccaagctgccctcgaaacatccaatctgctccaagttcagaggcagcctccagcgcatgggaagaggctattggattcagctgttcttcagcccacccgttcatcctgactatgggaaacaagaagctaaagcagacttatctttcagttttgtggcaaatgaggtactgagtgaaaggagagaagccttcatctccatagattcagaagagggagcattgctagaagacaatggcatgctcttggctcactggatcatctacgtctcggagatatgcgattattgtaacttacgcttccagggatctagcgttacaggaatgatcagcatggacggttcttattgctttgacattcatgtttcatctagtgaacttttctcatctgtcacggagcatttgctgaggaccttttcatctcatatcatccctcgtttagagtgccgttcagatgctactacctcagagaaagattga

SEQ ID NO: 439 - DNA, 518 bp, Homo sapiens
tgacactgctgaggtctaaacaaggaggcagaagtagtcttcagttcacgatcttctagttgcagcgatgagtgccacgagtgagattcaagatcccagaggaagaggagatggtccaggaggcctccccgatgtggttgccattccgtggcctccccggtgaatcctcagccaagaggaacccacccaactgacaatcaggatattgaaccctggacaagagagagaaggaacacctccgatcgaagaacgtaaagtagaaggtgattgcccaggaaatggatctgggaaaagactcggagtgagcgtgggagatggctctgatgtaaaagagaagactcccacctaaatccttaagcatgctaagactaaagaagcaggagatgggcagccataagttaaaaagaagaccaactgaagctacacacatggctgatgtcacattgaaaatgtgacttgaaaattttgaaaattctctccaataaagtttgagttttctctgaagaaaaaaaaaaaaa

SEQ ID NO: 440 - DNA, 631 bp, Homo sapiens
cctatgttgagtgcctatgtttagggtattatctagacattagtggtacatataagcataattaatccaaggttcctactttaattatatgtgaggtaagtagcatcttgattagtcctgatgttatttcattatatatcatggtcaatttaattttagaattatacatctgaagagaggggaagttttcaaagtggttttattagcatgttatttaacataataaagtattaatgtaatatttatggatatatttaaagaaatgaatgacttttaacgagattttctcccctctctctctctcattaggttcttggagtgtcaatgttttaataccagtacacaattaaatctgtggtgaagtcattttctaagtggaagaggaaattttaaagtgtggtagatacagtgaaattctgtacagatttttctctaaggagaatatgacatgcttatgcttaccaagatcaagtgcattgaggggcagttttgtttgcctgaataaacgtaaaggacaagtaaacaatttgatgataagctacagtttttcttagaaagtaaatattttatttatgcgctgttagttggcttttgaatcgattatttcatgcttttttttaaaaaaaaaaaa

SEQ ID NO: 441 - DNA, 952 bp, Homo sapiens
  misc_feature (1)...(952): n = a,t,c or g
caacacaggggcagtctccaggacctccacaccattaacaagatgagccttgtgctcccttgggctctagagaggaagcccctctgagccctcagcccctctttcctccctctcctaaagtaatttgatcctcaggaatttgttctgccctcatctggccctggccagctctgcatttgacaaatgccaggaagaggaaactgttgagaaaacggaactactggggaaagggagggctcactgagaacccatcccggttacccccgatcaccgcttggtcaccatgacccacattgttgcaaaccttttctcctgtcaacagccggccagcctcccaattacgagatgctcaaggaggagcaggaagtggctaagcctgggggcgccccaaaaaccgtgcttacccgaatgtccacgcgtgatcaacatccgcaacgagaacctcgtggcctgaccatgttcgtctggtccctgttcaaacaccctcttcatgaacacctgcttngcctgggcttcataagattcgccctactccgtgaaaagtctaagggacaggaaagatggttggcgacgtgaaccggggccccaaggcctaatgcctccaccgccaaagtgcctgaaaaatctgggccctgattttgggcatcttcaatgaccatttttgctcatcaatcatccccagttttgggtcgtcccaggcccagcgatagatcaggaggcatcattgaggcccaggagctctgcccgtgacctgtatcccacgtactctatcttccattcctcgccctgcccccagaggccaggaagctttgcccttgacctgtattccacttactccaccttccattcctcgccctgtccccacagccgagtcctgcatcagccctttatcctcacacgcttttctacaatggcattcaataaagtgtatatgtttctggtgcaaaaaaaa

SEQ ID NO: 442 - DNA, 1938 bp, Homo sapiens
gcggccgcagtggcgtcctggagccctcctcaggtgagctggagctgcccggctcggcagcgggaagtgctgaagctgctgaaagatggcagaagaagtggtggtagtagccaaatttgattatgtggcccaacaagaacaagagttggacatcaagaagaatgagagattatggcttctggatgattctaagtcctggtggcgagttcgaaattccatgaataaaacagggttttgtgccttctacctatgtgggaaggggaaaacagtgctcggaaagcatctattgtgaaaaacctaaaggataccttaggcattggaaaagtgaaaagaaaacctagtgtgccagattctgcatctcctgctgatgatagttttgtttgacccaggggaacgtctctatggacctcaacatgcccgctttatgtgaaatttaacttacatggctgagagagaggatgaattatcatttgataaagggggacaaaggtgatcgtcatggagaaatgcagtggatggttggtggcgtggtacctacaatggacaagttggatggttcccttcaaactatgtaactgaagaaagtgacacgtcctttgggtgaccatgtgggttctctgtcagagaaattagcagcagtcgtcaataacctaaatactgggcaagtgttgcatgtggtacaggctctttacccattcagctcatctaatgatgaagaacttaatttcgagaaaaggagatgtaatggatgttattgaaaaacctgaaaatgacccagagtggtggaaatgcaggaagatcaatggtatggttggtctagtaccacaaaaactatggtaaccgctattgcagagtattcaattaacctcaggtttgggaaccttaaccttccagtgtggattcattaggccttacattcctggaaagtttgttggcaatccttggtattatggcaaagtcaccaggcatcaagcagaaatggcattaaatgaaagaggacatgaaggggatttcctcattcgtgatagtgaatcttcgccaaatgatttctcagtatcactaaaagcacaagggaaaaacaagcattttaaagtccaactaaaagatgactgtctactgcatttggcagcgtaaatcatgcaccatggaatgacttgtagaacattacaaaaacggcaccaaatttttacaacgtgaacaaaggagaaaaattatatcttgtcaagcatttatccatgatactgctgacccagaagtgactgctgtgtagctgtaatttgtcatgtaattgaattgaagactgagaaaatgttgggtccagtcgtgcttgattgggaaattggttgtttctaaatccatatggagaatttgaccattaagtatttttattataactcagcccatacatatatactatgtatgcagtgcatctgcatagaacagttccttatccttggccttctgttttatggtttttttctttgctgttttcccccttggcttctaatattacagttttgtattttgtaaacaaaaaatcaaataatggcatatcagaatctttatatggaagaaatcctttattgccctttcctttgtttccttgtaaaggcaccctgttctgttatggtttttcattatataaaattattatatctatatatgacatatgctaaaatttcttggagagtgttaatcttttctgtgactaaatagcaataataagtggaaaattagaaattatttccaggtattatatttgtcacaggccattgtaaataccaagtatattgtgtctgccataatttttaaaaatacattcattgtcttcagtcatacagcaagacacatgagacatagattagaaaacatgttgtacaattttaatttacaactgttgaaaataacacaccccttaatttttttccaaaaaaaaaa

SEQ ID NO: 443 - DNA, 414 bp, Homo sapiens
  misc_feature (1)...(414): n = a,t,c or g
gggtggtggggcttctggactgagccgctgagggtgcgggctgaccctgtaagtggctgcggcgggaagatggcggagctgcgcgtgctcgtagctgtcaagagggtcatcgactacgccgtgaagatccgagtgaagcctgacagctgacctgaggctcaacgagccccgctacgccacgctgcccaacatcatgaaagccaagaagaagaagatcgaggtgatcaagcctggggacctgggtgtggacctgacctccaagctctctgtgatcagtgtggaggacccgccccagcgcacggccggcgtcaaggtggagaccactgaggacctggtggccaagctgaaggagattgggcggatttgagcccctcccagagatggcaataaaactgactctcaacatcaaaaaan

SEQ ID NO: 444 - DNA, 2035 bp, Homo sapiens
atttaattaccggaacgacccacgcgtccgaggctgcatatagaccctgggccggggctcgcgctggccggctgcagcgcgcaaggtgccaagccctcccctacgaagtctgttttgtctcaggctgggctgagtcacatagaatagatagatagttgatttagcacatgtcctccagatcatattatccgcctacaaatatagcctgttagcgcacaggcacgggaggcttcttccggctcggccgtgctgctcagcgggtgtataacagcctctgcggtgtaaacagcactctgcggtgtaaacagccgcgttggccaggccaggactgtcagtgcccgcccctcggggcaggtaatttcatgctcccaaaatgggacataaagtggttgtcttcgacatttctgtcatcagagccttgtgggaaactcgtgtcaagaagcacaaagcttggcagaagaaggaggtggaaaggcttgagaagagcgccttggagaagatatatttaggagtggaactttgtggccgaatgcaggaggaagggctttttcccaggctgtatactgcttgaatggcttcatagacaccagcgtgcggcttctggacaagattgaaaggaacactctcacaaggcagagttcacttcccaaggacagaggcaaacggagcagagcgtttgtgtttgaactttctggggagcactggacggagctcccagattcattgaaggagcagacacacctgagagaatggtacataagcaataccttgattcaaatcattcctacatatattcagttatttcaagcgatgagaattctggatctgccaaaaaaccaaatctcacatcttccagcagaaatcggttgtttgaagaacctgaaagaactcaatgtgggtttcaactatctgaagagcattcctccagaattgggagattgtgaaaatctagagagactggattgttctggaaatctaaaattaatggagctgccctttgaattaagtaatttgaagcaagttacatttgtagatatctcagcaaacaagttttccagtgtcccaatctgtgtcctgcggatgtcgaatttgcagtggttggatattcaccgccataacctggccgaccttgccgaagatatagacaggctagaggagctgcagagctttctcttgtataaaaacaagttgacctaccttccctattccatgctgaacctgaagaagctcactctgttagtcgtcagtggggaccatttggtggagctcccaactgccctttgtgactcatccacacctttaaaatttgtaagccttatggacaatcctattgataatgcccaatgtgaagatggcaatgaaataatggaaagtgaacgggatcgccaacattttgataaagaagttatgaaagcctatattgaagtccttaaagaaagagaatctgttcccagctataccaccaaagtgtcttttagccttcaactttgatatccatcagaagactgcaaatctcactattctctggagctatatataaatctttgttatgatcatgtcatataggaagaatggcttgtgcttaaggacaaagtctagaaaccactatcatagttgctaaaaaaaatggttttcaaatgtcaaatacatgagtatctccctccatggactggagaattgaaaaattggtttgtatattgatatttccaggttcatttgcatatacttttttccaaataatgcacatttaatatgttttaaaatgtcttatttttaagaattataactaaaagaccaaatactgaagttaagtgcattgttttcaggaatcaaaagataaaggggccgggtgtggtggctcacacctgtaatcccagcactttgggaggccgaagtgggtggatcacctgaggtccggagttcgaggctggtttggccagcatggcgaaaccccatctctactaaaaatacaaaaaattagctgggcatggtggcagttgcctgtaatcctagctactcaggaggctgaggcagg

SEQ ID NO: 445 - DNA, 809 bp, Homo sapiens
ccccccccccccccgccgcttctttctttccgcgccgatagcgctcacgcaagcatgggtttaacgtcccctaaaaccccgccggactttctgtaagtaagtgtggcaaagcaccaaccccccataaaagtgaccacagtaccaagaagggcaaggattcctctgtacgcccccagggaaaacggcgttatgacaggaagcagagacggctatggtggccatactaagccgattttccggataaaggctaaaactactgagaaaattgtgctaaggcttgagtgcgttgagcccaacttgcagatctaagagaatgctggctattaaaagatggcaagcatttttgaacttgggaggagataagaagagaaaggggccaagtgcatccaagttctaagtgttcatctttttatttattgaagacaataaaaatcttgaagtttatgttcacttcatttgtttgctgttcatcttttgggagggaataagctagagccatcaatacaattccgcttgtggggaaatttatgcctcttactggtactacttgttttgcattgaagctgactggttgagttcacatcatatgttgcaattttctaatttggcacttcaatcactaggggccttatgaggcagtttgtcattatgcaatggttattggttatcatgtgagtagacacatttcaggctaatagggagaagtcagtaacacattcatagtgaatatgagatgtctttgctaagagttaagtgtcagatctttgttataacagttaatttaataaagaattttggcattgttcttc

SEQ ID NO: 446 - DNA, 1161 bp, Homo sapiens
atggagctgaaagccaaggctcgagaactacgtgaagaatgcagaagcctcaggagccgatgcgatcaactggaagaaagggtatcagtgatggaaaatgaaatgaatgaaatgaagcgagaagggaagtttagagaaaaaagaataaaaagaaacgaacaaagccttcaagaaatatgggactatgtgaaaagaccaaatctacatctgattggtgtacctgaaagtgacggggagaatggaaccaagttggaaaacactctgcaggatattatccaggagaacttccccaatctagcaaggcaggccaacattcagattcaggaaatacagagaacgccacaaagatactcctcgagaagagcaactccaagacacataattgtcagaatcaccaaagtggaaatgaaggaaaaaatgttaagggcagccagagagaaaggtcgggttccccacaaagggaagcccatcagactaacagcggatctctcgtcagaaactctacaagccagaagagagtgggggccaatattcaacattcttaaaagaattttcagctttccacagcgcgggggaacgggaggccgcaggatggtcaagctgacggcggagctgatcgagcaggcggcgcagtacaccagcgcggtgcgcgaccgggagctggacctccgggggtataaaattcccgtcattgaaaatctaggtgctacgttagaccagtttgatgctattgatttttctgacaatgagatcaggaaactggatggttttcctttgttgagaagactgaaaacgttgttagtgaacaaaacagaatatgccagtactggatttccagaaagtgaaactaaagagcgtcaggaagcagagaaaatgttcaagggcaaacggggtgcacagcttgcaaaggatattgccaggagaagcaaaacttttaatccaggtgctggtttgccaactgacaaaaagaaaggtgggccatctccaggggatgtagaagcaatcaagaatgctatagcaaatgcttcaactctggctgaagtggagaggctgaaggggttgctgcagtctggtcagatccctggcagagaacgcagattggggcccactgatgatggtgaagaagagatggaagaagacacagtcacaaacgggtcctga

SEQ ID NO: 447 - DNA, 352 bp, Homo sapiens
cccttcaacttttgtagagcattccatttagttgcaaggaaaaattaaataaaaaaaataaaattggagctgcctttactgatgatgctttgccatgggtgtggcttacattctaaagcttttggatcagtatcgggagtttgattcacttcactggttccagtctgttagagagaaatacctgaaggagataagagcagttgctaagcaacagaatgtacagtcagccagtcaagatgaaaaactcttacaaaccatgaatctcactcagaagcgactggatgtctatctacagtgcaagaattttcttcagagcagacaagactgcggctgaagaaaaccaagaaaaaaa

SEQ ID NO: 448 - DNA, 1251 bp, Homo sapiens
acagagcaagactccgtctcacacacaaaaaaatgaaagattggaatgccacccctttcctagcatgcacaacatatggcaggatcctgctcttctgtcccctgtagcgggttgtcccgtgttccccttaaggaagaaatcacagtttttgtcctcctggtgcttccggctggaggttcacctgctagtccctgatcctctttgcttagtgatgcacatgagtctactcatccccccaccactcccagcccccacttttttaagaataagaggtgataggcagttcggcggtcccgcgggtctgtctcttggcttcaacagtgtttggacggaacagatccgggggactctcttcccagcctccgaccgccctccgatttccctctccgcttgcaaacctccgggaccatcttctcggccatcttcctgcattctgggacctgccagcaccgtttttgtggttagctctttcttgccaacccaaccatgagtctccaggattcgtcagaatatttccacccgacgttgaaggcaagcctgtctaacagccctggtcaaatttgtacctgcagggcctcccaccacctacctctctctggggtttctatttcgacccgcgatgatgtgggctctggaaaggcgtgagccaatttctttcggcgaattgggccgaggaagaagcgccgagggctacgagcgttcttcctgaaagatgcaaaaaaccagccgtgggcggcccgcgctcttcttccaggacaatcaagatagccagcttgaagatggagtggggtaaaaccccccagacgcccatgaaaagctgccatggccctggaggaaaaagcttgaacgcaggccctttttggatctttcattgccctggggttcttgcccgcacggacccccatgctcctgtgagcttccctggagactcacttccctagatgagggaagtgaagcttatcaaagaagatgggtgaccacctgagccaacctccacagggctgggtggcccggaggctggggctggggcgaagtatctcttcggaaaggctcactctcaagcacgactaagaagccttctgagcccagcgacttctgaaaaggcctcttgcaaagtaatacgggcttctgcctaagcctctccctaccagccaatagggaggctttcttaactattcctaacaaggccttgggaccaaatgggaaataaagctttttgatggcaaaaaaaaacctcgtggccgaattctt

SEQ ID NO: 449 - DNA, 792 bp, Homo sapiens
  misc_feature (1)...(792): n = a,t,c or g
ttcttttataagagcgtcctggcccaaaaggaagttcgttgtgtcctggatgagtcagccctctcgggccccctgagctcaagnccgtgcgcatgtttgctgatcttcgccccacgagagtcggagggacagctccgtgcccgagctggccgagaagatgagcaggagcgtggacgtgcccacaccaccttccctgctcatggcggcctccatctatctccacgaccagaacccggatgccgccctgcgtgcgctgcaccagggggacagcctggagtgcacagccatgacaatgcaggatgcctactacatcttccaggagatggctgacaagtgctcgcccaccctgctgctgctcaatgggcaggcggcctgccacatggcccagggccgctgggaggccgctgagggcctgctgcaggaggcgctagacaaggatagtggctacccggagacgctggtcaacctcatcgtcctgtcccagcacctgggcaagccccctgaggtgacaaaccgatacctgtcccagctgaaggatgcccacaggtcccatcccttcatcaaggagtaccaggccaaggagaacgactttgacaggctggtgctacagtacgctcccagcgcctgaggctggcccagagctgtcaggaccatgaagccaggacagaggccaggagccagccctgcagccctccccacccggcatccacctgcatcccctctgggggcaggagcccacccccagcacccccatctgttaataaatatctcaactccagggtgttccacctg

SEQ ID NO: 450 - DNA, 12517 bp, Homo sapiens
ctaccgggcggaggtgagcgcggcgccggctcctcctgcggcggactttgggtgcgacttgacgagcggtggttcgacaagtggccttgcgggccggatcgtcccagtggaagagttgtaaatttgcttctggccttcccctacggattatacctggccttcccctacggattatactcaacttactgtttagaaaatgtggcccacgagacgcctggttactatcaaaaggagcggggtcgacggtccccactttcccctgagcctcagcacctgcttgtttggaaggggtattgaatgtgacatccgtatccagcttcctgttgtgtcaaaacaacattgcaaaattgaaatccatgagcaggaggcaatattacataatttcagttccacaaatccaacacaagtaaatgggtctgttattgatgagcctgtacggctaaaacatggagatgtaataactattattgatcgttccttcaggtatgaaaatgaaagttcttcagaatggaaggaagtcaactgaatttccaagaaaaatacgttgaccggcgcccagcacgtcgtgtctcaagatctagcttctcttctgaccctgatgagaaagctcaagattccaaggcctattcaaaaatcactgaaggaaaagtttcaggaaatcctcaggtacatatcaagaatgtcaaagaagacagtaccgcagatgactcaaaagacagtgttgctcagggaacaactaatgttcattcctcagaacatgctggacgtaatggcagaaatgcagctgatcccatttctggggattttaaagaaatttccagcgttaaattagtgagccgttatggagaattgaagtctgttcccactacacaatgtcttgacaatagcaaaaaaaatgaatctcccttttggaagctttatgagtcagtgaagaaagagttggatgtaaaatcacaaaaagaaaatgtcctacagtattgtagaaaatctggattacaaactgattacgcaacagagaaagaaagtgctgatggtttacagggggagacccaactgttggtctcgcgtaagtcaagaccaaaatctggtgggagcggccacgctgtggcagagcctgcttcacctgaacaagagcttgaccagaacaaggggaagggaagagacgtggagtctgttcagactcccagcaaggctgtgggcgccagctttcctctctatgagccggctaaaatgaagacccctgtacaatattcacagcaacaaaattctccacaaaaacataagaacaaagacctgtatactactggtagaagagaatctgtgaatctgggtaaaagtgaaggcttcaaggctggtgataaaactcttactcccaggaagctttcaactagaaatcgaacaccagctaaagttgaagatgcagctgactctgccactaagccagaaaatctctcttccaaaaccagaggaagtattcctacagatgtggaagttctgcctacggaaactgaaattcacaatgagccatttttaactctgtggctcactcaagttgagaggaagatccaaaaggattccctcagcaagcctgagaaattgggcactacagctggacagatgtgctctgggttacctggtcttagttcagttgatatcaacaactttggtgattccattaatgagagtgagggaatacctttgaaaagaaggcgtgtgtcctttggtgggcacctaagacctgaactatttgatgaaaacttgcctcctaatacgcctctcaaaaggggagaagccccaaccaaaagaaagtctctggtaatgcacactccacctgtcctgaagaaaatcatcaaggaacagcctcaaccatcaggaaaacaagagtcaggttcagaaatccatgtggaagtgaaggcacaaagcttggttataagccctccagctcctagtcctaggaaaactccagttgccagtgatcaacgccgtaggtcctgcaaaacagcccctgcttccagcagcaaatctcagacagaggttcctaagagaggaggagaaagagtggcaacctgccttcaaaagagagtgtctatcagccgaagtcaacatgatattttacagatgatatgttccaaaagaagaagtggtgcttcggaagcaaatctgattgttgcaaaatcatgggcagatgtagtaaaacttggtgcaaaacaaacacaaactaaagtcataaaacatggtcctcaaaggtcaatgaacaaaaggcaaagaagacctgctactccaaagaagcctgtgggcgaagttcacagtcaatttagtacaggccacgcaaactctccttgtaccataataatagggaaagctcatactgaaaaagtacatgtgcctgctcgaccctacagagtgctcaacaacttcatttccaaccaaaaaatggactttaaggaagatctttcaggaatagctgaaatgttcaagaccccagtgaaggagcaaccgcagttgacaagcacatgtcacatcgctatttcaaattcagagaatttgcttggaaaacagtttcaaggaactgattcaggagaagaacctctgctccccacctcagagagttttggaggaaatgtgttcttcagtgcacagaatgcagcaaaacagccatctgataaatgctctgcaagccctcccttaagacggcagtgtattagagaaaatggaaacgtagcaaaaacgcccaggaacacctacaaaatgacttctctggagacaaaaacttcagatactgagacagagccttcaaaaacagtatccactgtaaacaggtcaggaaggtctacagagttcaggaatatacagaagctacctgtggaaagtaagagtgaagaaacaaatacagaaattgttgagtgcatcctaaaaagaggtcagaaggcaacactactacaacaaaggagagaaggagagatgaaggaaatagaaagaccttttgagacatataaggaaaatattgaattaaaagaaaacgatgaaaagatgaaagcaatgaagagatcaagaacttgggggcagaaatgtgcaccaatgtctgacctgacagacctcaagagcttgcctgatacagaactcatgaaagacacggcacgtggccagaatctcctccaaacccaagatcatgccaaggcaccaaagagtgagaaaggcaaaatcactaaaatgccctgccagtcattacaaccagaaccaataaacaccccaacacacacaaaacaacagttgaaggcatccctggggaaagtaggtgtgaaagaagagctcctagcagtcggcaagttcacacggacgtcaggggagaccacgcacacgcacagagagccagcaggagatggcaagagcatcagaacgtttaaggagtctccaaagcagatcctggacccagcagcccgtgtaactggaatgaagaagtggccaagaacgcctaaggaagaggcccagtcactagaagacctggctggcttcaaagagctcttccagacaccaggtccctctgaggaatcaatgactgatgagaaaactaccaaaatagcctgcaaatctccaccaccagaatcagtggacactccaacaagcacaaagcaatggcctaagagaagtctcaggaaagcagatgtagaggaagaattcttagcactcaggaaactaacaccatcagcagggaaagccatgcttacgcccaaaccagcaggaggtgatgagaaagacattaaagcatttatgggaactccagtgcagaaactggacctggcaggaactttacctggcagcaaaagacagctacagactcctaaggaaaaggcccaggctctagaagacctggctggctttaaagagctcttccagactcctggtcacaccgaggaattagtggctgctggtaaaaccactaaaataccctgcgactctccacagtcagacccagtggacaccccaacaagcacaaagcaacgacccaagagaagtatcaggaaagcagatgtagagggagaactcttagcgtgcaggaatctaatgccatcagcaggcaaagccatgcacacgcctaaaccatcagtaggtgaagagaaagacatcatcatatttgtgggaactccagtgcagaaactggacctgacagagaacttaaccggcagcaagagacggccacaaactcctaaggaagaggcccaggctctggaagacctgactggctttaaagagctcttccagacccctggtcatactgaagaagcagtggctgctggcaaaactactaaaatgccctgcgaatcttctccaccagaatcagcagacaccccaacaagcacaagaaggcagcccaagacacctttggagaaaagggacgtacagaaggagctctcagccctgaagaagctcacacagacatcaggggaaaccacacacacagataaagtaccaggaggtgaggataaaagcatcaacgcgtttagggaaactgcaaaacagaaactggacccagcagcaagtgtaactggtagcaagaggcacccaaaaactaaggaaaaggcccaacccctagaagacctggctggctggaaagagctcttccagacaccagtatgcactgacaagcccacgactcacgagaaaactaccaaaatagcctgcagatcacaaccagacccagtggacacaccaacaagctccaagccacagtccaagagaagtctcaggaaagtggacgtagaagaagaattcttcgcactcaggaaacgaacaccatcagcaggcaaagccatgcacacacccaaaccagcagtaagtggtgagaaaaacatctacgcatttatgggaactccagtgcagaaactggacctgacagagaacttaactggcagcaagagacggctacaaactcctaaggaaaaggcccaggctctagaagacctggctggctttaaagagctcttccagacacgaggtcacactgaggaatcaatgactaacgataaaactgccaaagtagcctgcaaatcttcacaaccagacctagacaaaaacccagcaagctccaagcgacggctcaagacatccctggggaaagtgggcgtgaaagaagagctcctagcagttggcaagctcacacagacatcaggagagactacacacacacacacagagccaacaggagatggtaagagcatgaaagcatttatggagtctccaaagcagatcttagactcagcagcaagtctaactggcagcaagaggcagctgagaactcctaagggaaagtctgaagtccctgaagacctggccggcttcatcgagctcttccagacaccaagtcacactaaggaatcaatgactaatgaaaaaactaccaaagtatcctacagagcttcacagccagacctagtggacaccccaacaagctccaagccacagcccaagagaagtctcaggaaagcagacactgaagaagaatttttagcatttaggaaacaaacgccatcagcaggcaaagccatgcacacacccaaaccagcagtaggtgaagagaaagacatcaacacgtttttgggaactccagtgcagaaactggaccagccaggaaatttacctggcagcaatagacggctacaaactcgtaaggaaaaggcccaggctctagaagaactgactggcttcagagagcttttccagacaccatgcactgataaccccacagctgatgagaaaactaccaaaaaaatactctgcaaatctccgcaatcagacccagcggacaccccaacaaacacaaagcaacggcccaagagaagcctcaagaaagcagacgtagaggaagaatttttagcattcaggaaactaacaccatcagcaggcaaagccatgcacacgcctaaagcagcagtaggtgaagagaaagacatcaacacatttgtggggactccagtggagaaactggacctgctaggaaatttacctggcagcaagagacggccacaaactcctaaagaaaaggccaaggctctagaagatctggctggcttcaaagagctcttccagacaccaggtcacactgaggaatcaatgaccgatgacaaaatcacagaagtatcctgcaaatctccacaaccagacccagtcaaaaccccaacaagctccaagcaacgactcaagatatccttggggaaagtaggtgtgaaagaagaggtcctaccagtcggcaagctcacacagacgtcagggaagaccacacagacacacagagagacagcaggagatggaaagagcatcaaagcgtttaaggaatctgcaaagcagatgctggacccagcaaactatggaactgggatggagaggtggccaagaacacctaaggaagaggcccaatcactagaagacctggccggcttcaaagagctcttccagacaccagaccacactgaggaatcaacaactgatgacaaaactaccaaaatagcctgcaaatctccaccaccagaatcaatggacactccaacaagcacaaggaggcggcccaaaacacctttggggaaaagggatatagtggaagagctctcagccctgaagcagctcacacagaccacacacacagacaaagtaccaggagatgaggataaaggcatcaacgtgttcagggaaactgcaaaacagaaactggacccagcagcaagtgtaactggtagcaagaggcagccaagaactcctaagggaaaagcccaacccctagaagacttggctggcttgaaagagctcttccagacaccagtatgcactgacaagcccacgactcacgagaaaactaccaaaatagcctgcagatctccacaaccagacccagtgggtaccccaacaatcttcaagccacagtccaagagaagtctcaggaaagcagacgtagaggaagaatccttagcactcaggaaacgaacaccatcagtagggaaagctatggacacacccaaaccagcaggaggtgatgagaaagacatgaaagcatttatgggaactccagtgcagaaattggacctgccaggaaatttacctggcagcaaaagatggccacaaactcctaaggaaaaggcccaggctctagaagacctggctggcttcaaagagctcttccagacaccaggcactgacaagcccacgactgatgagaaaactaccaaaatagcctgcaaatctccacaaccagacccagtggacaccccagcaagcacaaagcaacggcccaagagaaacctcaggaaagcagacgtagaggaagaatttttagcactcaggaaacgaacaccatcagcaggcaaagccatggacaccccaaaaccagcagtaagtgatgagaaaaatatcaacacatttgtggaaactccagtgcagaaactggacctgctaggaaatttacctggcagcaagagacagccacagactcctaaggaaaaggctgaggctctagaggacctggttggcttcaaagaactcttccagacaccaggtcacactgaggaatcaatgactgatgacaaaatcacagaagtatcctgtaaatctccacagccagagtcattcaaaacctcaagaagctccaagcaaaggctcaagatacccctggtgaaagtggacatgaaagaagagcccctagcagtcagcaagctcacacggacatcaggggagactacgcaaacacacacagagccaacaggagatagtaagagcatcaaagcgtttaaggagtctccaaagcagatcctggacccagcagcaagtgtaactggtagcaggaggcagctgagaactcgtaaggaaaaggcccgtgctctagaagacctggttgacttcaaagagctcttctcagcaccaggtcacactgaagagtcaatgactattgacaaaaacacaaaaattccctgcaaatctcccccaccagaactaacagacactgccacgagcacaaagagatgccccaagacacgtcccaggaaagaagtaaaagaggagctctcagcagttgagaggctcacgcaaacatcagggcaaagcacacacacacacaaagaaccagcaagcggtgatgagggcatcaaagtattgaagcaacgtgcaaagaagaaaccaaacccagtagaagaggaacccagcaggagaaggccaagagcacctaaggaaaaggcccaacccctggaagacctggccggcttcacagagctctctgaaacatcaggtcacactcaggaatcactgactgctggcaaagccactaaaataccctgcgaatctcccccactagaagtggtagacaccacagcaagcacaaagaggcatctcaggacacgtgtgcagaaggtacaagtaaaagaagagccttcagcagtcaagttcacacaaacatcaggggaaaccacggatgcagacaaagaaccagcaggtgaagataaaggcatcaaagcattgaaggaatctgcaaaacagacaccggctccagcagcaagtgtaactggcagcaggagacggccaagagcacccagggaaagtgcccaagccatagaagacctagctggcttcaaagacccagcagcaggtcacactgaagaatcaatgactgatgacaaaaccactaaaataccctgcaaatcatcaccagaactagaagacaccgcaacaagctcaaagagacggcccaggacacgtgcccagaaagtagaagtgaaggaggagctgttagcagttggcaagctcacacaaacctcaggggagaccacgcacaccgacaaagagccggtaggtgagggcaaaggcacgaaagcatttaagcaacctgcaaagcggaacgtggacgcagaagatgtaattggcagcaggagacagccaagagcacctaaggaaaaggcccaacccctggaagacctggccagcttccaagagctctctcaaacaccaggccacactgaggaactggcaaatggtgctgctgatagctttacaagcgctccaaagcaaacacctgacagtggaaaacctctaaaaatatccagaagagttcttcgggcccctaaagtagaacccgtgggagacgtggtaagcaccagagaccctgtaaaatcacaaagcaaaagcaacacttccctgcccccactgcccttcaagaggggaggtggcaaagatggaagcgtcacgggaaccaagaggctgcgctgcatgccagcaccagaggaaattgtggaggagctgccagccagcaagaagcagagggttgctcccagggcaagaggcaaatcatccgaacccgtggtcatcatgaagagaagtttgaggacttctgcaaaaagaattgaacctgcggaagagctgaacagcaacgacatgaaaaccaacaaagaggaacacaaattacaagactcggtccctgaaaataagggaatatccctgcgctccagacgccaagataagactgaggcagaacagcaaataactgaggtctttgtattagcagaaagaatagaaataaacagaaatgaaaagaagcccatgaagacctccccagagatggacattcagaatccagatgatggagcccggaaacccatacctagagacaaagtcactgagaacaaaaggtgcttgaggtctgctagacagaatgagagctcccagcctaaggtggcagaggagagcggagggcagaagagtgcgaaggttctcatgcagaatcagaaagggaaaggagaagcaggaaattcagactccatgtgcctgagatcaagaaagacaaaaagccagcctgcagcaagcactttggagagcaaatctgtgcagagagtaacgcggagtgtcaagaggtgtgcagaaaatccaaagaaggctgaggacaatgtgtgtgtcaagaaaataacaaccagaagtcatagggacagtgaagatatttgacagaaaaatcgaactgggaaaaatataataaagttagttttgtgataagttctagtgcagtttttgtcataaattacaagtgaattctgtaagtaaggctgtcagtctgcttaagggaagaaaactttggatttgctgggtctgaatcggcttcataaactccactgggagcactgctgggctcctggactgagaatagttgaacaccgggggctttgtgaaggagtctgggccaaggtttgccctcagctttgcagaatgaagccttgaggtctgtcaccacccacagccaccctacagcagccttaactgtgacacttgccacactgtgtcgtcgtttgtttgcctatgttctccagggcacggtggcaggaacaactatcctcgtctgtcccaacactgagcaggcactcggtaaacacgaatgaatggataagcgcacggatgaatggagcttacaagatctgtctttccaatggccgggggcatttggtccccaaattaaggctattggacatctgcacaggacagtcctatttttgatgtcctttcctttctgaaaataaagttttgtgctttggagaatgactcgtgagcacatctttagggaccaagagtgactttctgtaaggagtgactcgtggcttgccttggtctcttgggaatacttttctaactagggttgctctcacctgagacattctccacccgcggaatctcagggtcccaggctgtgggccatcacgacctcaaactggctcctaatctccagctttcctgtcattgaaagcttcggaagtttactggctctgctcccgcctgttttctttctgactctatctggcagcccgatgccacccagtacaggaagtgacaccagtactctgtaaagcatcatcatccttggagagactgagcactcagcaccttcagccacgatttcaggatcgcttccttgtgagccgctgcctccgaaatctcctttgaagcccagacatctttctccagcttcagacttgtagatataactcgttcatcttcatttactttccactttgccccctgtcctctctgtgttccccaaatcagagaatagcccgccatcccccagatcacctgtctggattcctccccattcacccaccttgccaggtgcaggtgaggatggtgcaccagacagggtagctgtcccccaaaatgtgccctgtgcgggcagtgccctgtctccacgtttgtttccccagtgtctggcggggagccaggtgacatcataaatacttgctgaatgaatgcagaaatcagcggtactgacttgtactatattggctgccatgatagggttctcacagcgtcatccatgatcgtaagggagaatgacattctgcttgagggagggaatagaaaggggcagggaggggacatctgagggcttcacagggctgcaaagggtacagggattgcaccagggcagaacaggggagggtgttcaaggaagagtggctcttagcagaggcactttggaaggtgtgaggcataaatgcttccttctacgtaggccaacctcaaaactttcagtaggaatgttgctatgatcaagttgttctaacactttagacttagtagtaattatgaacctcacatagaaaaatttcatccagccatatgcctgtggagtggaatattctgtttagtagaaaaatcctttagagttcagctctaaccagaaatcttgctgaagtatgtcagcaccttttctcaccctggtaagtacagtatttcaagagcacgctaagggtggttttcattttacagggctgttgatgatgggttaaaaatgttcatttaagggctacccccgtgtttaatagatgaacaccacttctacacaaccctccttggtactgggggagggagagatctgacaaatactgcccattcccctaggctgactggatttgagaacaaatacccacccatttccaccatggtatggtaacttctctgagcttcagtttccaagtgaatttccatgtaataggacattcccattaaatacaagctgtttttactttttcgcctcccagggcctgtgcgatctggtcccccagcctctcttgggctttcttacactaactctgtacctaccatctcctgcctcccttaggcaggcacctccaaccaccacacactccctgctgttttccctgcctggaactttcccaccagccccaccaagatcatttcatccagtcctgagctcagcttaagggaggcttcttgcctgtgggttccctcacccccatgcctgtcctccaggctggggcaggttcttagtttgcctggaattgttctgtacctctttgtagcacgtagtgttgtgaaactaagccactaattgagtttctggctcccctcctggggttgtaagttttgttcattcatgagggccgactgtatttcctggttactgtatcccagtgaccagccacaggagatgtccaataaagtatgtgatgaaatggtcttaaaaaaaaaaaaaaaaaaaaaa

SEQ ID NO: 451 - DNA, 372 bp, Homo sapiens
ttgtgggtggcgggacaggcttcattgggacagccctaacccagctgctgaatgccagaggccacgaagtgacgttggtctcccgaaagcccgggcccggccggatcacgtgggatgagctcgctgcatcggggctgccgagctgcgatgccgccgtcaacctggccggagagaacatcctcaaccctctccgaaggtcagcccgggccctaaagctgatacccactagagcacagggaggacagtgccccactgatgagaacctgtgagctatggcttactaccagcccagtctgactgcggagtatgatgaagacagcccaggaggggactttgactttttctccaacctcgtaaccaaatgggaagctg

SEQ ID NO: 452 - DNA, 1112 bp, Homo sapiens
atcttgacgaggctgcggtgtctgctgctattctccgagcttcgcaatggtaagcttcaggggtgtgaagtcgccggcgttcttgggtttgaggactcagtggggagagccttcggcgggagcgctccttggcctgccggcctcggttgcagggcgggcgcggttattgcttggcccatgtgctctggtggtggagtttgcgggggctgggggcgcagtattaggggactttggcgctatttgaggacctggttgcattcccgctgccctcctacagccgcctaaggacgacaagaagaagaaggacgctggaaagtcggcccaaagaaagacaaagacccagtgaacaaatccggggcaaaggccaaaaagaaggtagaaataagacctctctgaaagagactaggggtaactctctcgtaaccctctagtaatagggaacttggataagtaagtggtttttcaggtgtagatttctagagtcaaaatgtgagagtttatcttcccgtcaccactcgttctttttcccattaggatcatgaaaatgggtctgttgtgcgaagtgtctgccgctgtgcctgctgtgttatttttaactgatctagtggggctcggcccctgtttgaaggccaaaaacgtgtcggtgttttttttttttgtttttgttttagtaatgtgtaatttatccttgataacggtggaacagatttctctgacgcagattactcgagagggaaagggtgcttctgccagaaatactaacttgtttctgttttgttttggtgagcagaagtggtccaaaggcaaagttcgggacaagctcaataacttagtcttgtttgacaaagctacctatgataaactctgtaaggaagttcccaactataaacttataaccccagctgtggtctctgagagactgaagattcgaggctccctggccagggcagcccttcaggagctccttagtaaaggacttatcaaactggtttcaaagcacagagctcaagtaatttacaccagaaataccaagggtggagatgctccagctgctggtgaagatgcatgaataggtccaaccagctgtacatttggaaaaataaaactttatt

SEQ ID NO: 453 - DNA, 792 bp, Homo sapiens
atggcgccgcccacgtgtggtacggcccacgtggttccgacagtcaagatggcgggagcagctcccaggcttccctggagtcggccccacggatcatgcggctggtggccgatgcagccgctccagggcccgggcaggcgagctgtggctgccgcatgggaagtggccactcctgtgttcatgccagtgggcacgcaggccaccatgaaggcatcacgaccgaacagctggacgctctgggttgccgcatctgcctgggaatacctaccatctgggtctaaggccggtgggacagcggcgtttccagatggtgtcgctggtgtctctgtccgaggtgacggaggagggctccgcttccgctccccctacgacggcaatgagaccctgctgagcccggaaaatccgtgcagatccagaatgcgctgggcccctggggttgtgactggggccctgttgcaggtcaatccgctggctggaccggtgcatgcagcccatcagcggccggacaagcagaacctcttcgccattatccaggtgggctggacgcagatctccgggccacctgccttgaagcgctttggctctgcctggcacagccgcgccttcctcacgcactgctgcacagtgacaacacggccgcgctgcaccacctcacggccacaacatcgcctaccagctgagctcatgagcgccgtccgcaccagcatcgtggagaagcgcttcccggattcgtgcgggacttcatgggcgccatgtacggggatcccaccctctgtccacctgggccactga

SEQ ID NO: 454 - DNA, 1716 bp, Homo sapiens
tggtggaattcgtacatcagagaattcatatttgatagagaaattgtggcatatacaggtagtaaagaaagcacattgtgtcaatggatttatcccactgaacaatttgaatgaagacaatgtggaatggctttgagatacagttcagtttttattaggcatcaatttgtattggtgtgaacttttcaaaatgtaaatcatatatgcagtttctttggtatgacctgtgttaactcagattcagagaatttataatgtatttttttaataacataagaaaacttttctgatattcctctagttttggattgccaaaatattcacagtagaggaaaactgagaaaacgtaggaaaccattctttatacttgcatgtaaacatcttccagcaacaatcatttattgttaaacctggaaaaagccattacacaggaaacctctgttgatataagcgatgatgggaaaggctatttagccactctgcatatttaatgctcatgatcaacatctgcttcctatagctgggatgatatgggggaagatatttatcccttctggggatcatatataaatgatgatagtagtacctacagtatagtgctgttagaattacgtgagttagatgtggaggtcagagtggaagcaggtgtgagagggtcccgcagaagaaaacatggctgccaaagtgtttgagtccatcggcaagtttggcctggccttatctgatgcaagatagcatggtgaactctgccttatgtaatgtgtatgctgggcacagagctgccatctttgaccaatttcgtggagtacagaacattgtggtatgggaagggactcactttctcatcccatgtgtacgaaaaccaattatgtttgactgctgttctcaaccacgtagtccgccagtcatcactggtagcaaagatttacagaatgtcaacatcacactgtgcatcctcttccggcccatcactagccagcttcctcgcatcttcaccagcattggagaggactacgatgagtgtgtgctgccgttcattaccacggagatcctcaagtcactggtggctcgctttgatgctggagaactaatcacccagagggagctggtctccagccaggtgagcaacaaccttatggagtgagcagccacctttgggctcattctggacgacgtgtctttgacacatctgaccttcttgaaggagttaacagacaggtggccccccaggaagcagagagcgccagatttgtggtggaaaaggcggccatcatctctgctgagggtgactccaaggcagctgaagctgatcgccaactcactggccactgcaggggacggccagagcgagctgtgcaagctggaagctgcagaagacattgcataccagctctcatgctctcggaacatcacctgcctgccggcagggcagtccgtgctcctccagctgccctagtgaggccccagcctacctgcacctccgtgaggcaactgggccccagccccgatgattcgtaacaccacctttcgccctcaccccagaaatcactgaaatttcatgattggcttaaagtgaaggaagtaaaggtaaaatcacttcagatctctaaaaaacaaagatttacatgagttagtacatccacagattatgggtatggacatggaatatactgttacgttcaattaccattagcttctgtatataataatatcaaa

SEQ ID NO: 455 - DNA, 624 bp, Homo sapiens
ggcccagctgtgcccagatggatgggacagagacccggcagcggaggctggacagctgtggcaaagccaggggagctggggcttcctcaccccctcagcacaggaggactccctgtagcctcagaagatggagctctcagggcccctgagagccaaagcgtgacccccaagccactggagactgagcctagcagggagaccgcctggtccataggccttcaggtgaccgtgcccttcatgtttgcaggcctgggactgtcctgggccggcatgcttctggactatttccaggccaacactggacaaattgatgacccccaggagcagcacagagtcatcagcagcaacctggccctcatccaggtgcaggccactgtcgtggggctcttggctgctgtggctgcgctgctgttgggcgtggtgtctcgagaggaagtggatgtcgccaaggtggagttgctgtgtgccagcagtgtcctcactgccttccttgcagcctttgccctgggggtgctgatggtctgtatagtgattggtgctcgaaagctcggggtcaacccagacaacattgccacgcccattgcagccaggcctggagacctcatcacactgtccattctggct

SEQ ID NO: 456 - DNA, 397 bp, Homo sapiens
cgcggccgcgtcgaccttcaatgtcacacatgttggctgtgcttccaagatccctaacactgtctctttaaaagcagtactgtccagactctgggatccatagatgggcatcaggagagagatcttggaagtaatccgaaatagtaaaacaaatttcctatgcataagcttttgtgtgtgcttggggtgggggccgggggaagtattatagaggtggaggggccatagcttacacgagattttcaaaaggtctgtgactcaaaataacttaattgagtacagaatacctataatgtccttgtgctgtgccagcgatacacgacagtgtttaacactacgtcagttcccgccgttaaaaagctgacagtcactgtgaatacaatctccatcttctaaa

SEQ ID NO: 457 - DNA, 1320 bp, Homo sapiens
  misc_feature (1)...(1320): n = a,t,c or g
agtcggctaggattgcaaagctgtgggctgagcactcaggcaatcacactctcagaaactgcggcggctctggactgcagcctcccaaggctccatgccggacaaagcatgcgtagtcacacttgctacaatagcctgggatggtttcttttggtctccaatttattcacacacagcaaatattttgccagatatccgaaaatgaagatttcatcaaagactgcgttccgaatccataacaagttcccgatcagaggtgaaaccaacaagccaagtgatatgcttatacatgacttgggacccagcactagcccaaattgcaaaagcatgggccacgcaattgccacgttttcacataatacacggctgaaagccacccccacaagcctggcatncaaactttcactttcactggggagagaacatcttgggacttgggtctgttgcccatttttttctgtgtcttccgccatcacaaactgggtatgacgaaatcccaggactattgacttcaagactccggatatgccaaaaaagtctgtggccaactacactcaggttggtttgggcagattagttacaaagttgggctgcgcagtttcaattttggccctaaaagtttctggctttgaccgtctttctcccaatggagcacatttttatatgcaactaccgggcccaggagggaattacccccaacttggccatataagagaggagccaccctggcagtgcctgccccaataatgacaaggtgtttggacaatctctgtgttaaccggacagcgagaccaagtcaaacgttactactctgttgtatatccaggctggcccatatatccacggtaacagaggcgggttctctctttctcattggtaattcagtaattctaatactgtgtgttataattaccattttggtacagcacaagtaccctaatttagttcttttggactaatacaattcaggaaagaaaaaacccaaaaaccaacctcattcacatatggctttttttttaaccaataacaattaggggcacttctattttaaaacatttcagaaaaaaatatatgttatagcaatactcttactcaaaagaagaaatttcctaactctatcagataaactcatctttagtatacctatgcattattatgcaggttgtcacaacgtggacttttattatgtatcctaactgcatgttacaccttctatatgctgcagatcgatccctgtaccattgcacatttttaggtgattctcaataacttgcctaggccatattaacttaaaaccatgatactttgagcgaggcgcat

SEQ ID NO: 458 - DNA, 494 bp, Homo sapiens
atgcctcaggatcagtcatcacttcgggaatttgggcctcgaggcctagaattcggactatcgctccagcgagacgccgtcaagcagctttgtagtttttaagagaagaaaaaggaggagaaagtcacacctggccagcctgaagagagatgacaacatgaacacatctgaggatgaggacatgttccccatcgagatgagctcggatgaggccatggagctgctggagagcagcagaactcttcctaatgatatacctccattccaagatgatattcctgaggaaaacctctccctggctgtgatttaccctcagtcagcctcataccctaattcggatagagagtggtcacccactcccagtagcctggtagattgcaaaaggactgcccctcatcttgcagttgcggccgagggaggtctgtctagttcttgccctccacagtcttccctgttccatccttcggaaagtccttccggttcccgaccttcaa

SEQ ID NO: 459 - DNA, 1013 bp, Homo sapiens
gagactcccaacacaggggaagtctccaggacctccacaccattaacaagatgagccttgtgctcccttgggctctagagaggaagcccctctgagccctcagcccctctttcctccctctcctaaagtaatttgatcctcaggaatttgttctgccctcatctggccctggccagctctgcatttgacaaatgccaggaagaggaaactgttgagaaaacggaactactggcggaaaggcgagggctcactgagaacccatcccggttacccccgatcaccgctggtcttcgctcggacaccatgaaccacattgttgcaaaccttcttctctcctgtcaacagcggcccaggcttcccaactacgagatgctcaaggaggagcacgaggtggctgtagctgggggcgccccaaaaaccgtgcttacccgaatgtccacctgtgatccactatccgcaggcgagacctccgtggcctgaccatgttcgtctggtcccgtgttcaaacaccctcttcaatgaacccctgcatgccgtgggcttcataagcattcgctctactccgtgaaaagtctaagggacaggaaagatggttggcgacgttgaaccggggccccaaggcctaatgcctccacccgccaaagtgcctgaaaaatctgggcccgtgattttggggcatcttcatgaaccaattcttgctcatcaatcatccccccccaagtgttgggtcgtccagggcctaatggatagatcaaggaaggcatcactgaagggcaaggaagctctgccccgttgaacctgtaatcccaccgtactccaactttccattcctcggcctgcccccagaggccaggaagttctgcccttgaactgtattccacttactccaccttccattcctcgccctgtccccacagccgagtcctgcatcagccctttatcctcacacgcttttctacaatggcattcaataaagtgtatatgtttctggtaaaaaaaaaaaaaagtcgagc

SEQ ID NO: 460 - DNA, 1160 bp, Homo sapiens
  misc_feature (1)...(1160): n = a,t,c or g
ctttccgctcggctgttttcctgcgcaggagccgcaggggccggtaggccagcccatggcgcccaagccggaaatggccatgggtcttgaacgccccacttccaccaagggactggcaagcgggcggcgtggcccacgtgtttcaaaccagccgggccgggtaagatccgccagacgtaaaggccccgcaaagcccaaaggcgccgccgcatcgctccgcgcccccgcgtcggggtcccaatccggcccaatcgtgcgctgccccacgggttcgggtccacacgaaggttgcgcgccggcccccggcttccagccttgaggaagctcagggtggccggcattcacaagaaaggtggcccggaccttcggcattttctgtggatccgaggaagccggaccaagtcccacggagttccttcaaggccaaacgtgcagcggctgaaggagtaccgctccaaaactcatcctctttccccagagaagccctcggccccccaagaagggagacaggtctggctgaagaactgaaactggcccacccagcttgacgggaccggtcaatgcccgtccggaacgttcaaatagaaggagaaagctcgagtcatcactgagcaagcagaagaatttcaaagccttcgctagtctccgtatggcccgtgccaacgccccggctcttcggcatacgggccaaaaagagcccagggaagccgcagaaccaggatgttgaaaagcccacaataaagnccctgcctggggactttggaatcaagtcgggcagtcatgctgggtctccacgtggtgtgtttcgtgggaacaactgggcctgggatggggcttcactgctgtgacttcctcctgccaggggatttggggctttcttgaaagacagtccaagcccctggataatgctttactttttgtgttgaagccctgttggttgtttggttagtgactgatgtaaaacggttttcttgtggggggggtaccaaaggctgacttcagagtggacttgtgttttttctttttaaagaggcaaggttgggctggtgctcacagctgtaatcccagcactttgagattggctgggagttcaagaccagcctggccaacatgtcagaactactaaaaataaagaaatcagccatgaaaaaaaaaaaaaa

SEQ ID NO: 461 - DNA, 1591 bp, Homo sapiens
  misc_feature (1)...(1591): n = a,t,c or g
gcggccgcggagctgggaaggccgagggcgccgggcacgtctgtgcagatttctttagagtcgaggtctgtcgcccgcgtcttcgtcggtggcagcagggctgactggccacggcggccatctgctagagcgcatttcttaccatgaaacgccacctcctccgaagtgcggagcgaacgcagccaaatctacacaaagactgacaagctggatccactcgacggaacccagggccaaaaaacggcggcgagcagcgcctcgggcccgcgattaccggttttctgagcaccggacagcgtgagccgtgccagccctgtctcgccatcccagccgaggagggcagcgcgatggctcttccctgccttgaaatcaaccccattgccagccgctttcgccggcagagcattttccgtggggtccatccggctccaaggcggcctgcgctggccacgtggaaagaaacacgcccactgcctacaggccacgcccttcctcccttcgcgcatgcgccccacccgtcctgaggacctccgaacctgcagggggcgatgaaagtaggcttgcgctccgcttgtagctgcttccgggtcagaggtcagacggtctagcgctgcgtgggccatggtgcagctccgaccgcgagcgtctcgcgccccggcgtcggcggaggcgatggtggacgagggccagctggcctcggaggaggaggaggcggagcacgggctgttgctcgggcagcccagcagcggcgcggccgccgagccccttggaggaagacgacagaaggggacgatgagtttgacgatggaggccccgaagagcatganctattcgccagcgccccaggcggaagcgagagaagaggagcggcgagtgcgggagaccgtgcgcagggataaaacgctcctgaaggagaagaggaagcggacgcggaggagctgttcatcgaacagaagaaaagaaaacttccttccagacactattttggagaatgttaaccacagcttcacagactaacatcaagaaattccgccaggaaacggtgaaagaaggttaatttgcaaaagaaaaatgaagacttgtgaaaaaggaaattgactccaagaaagttaaagtacaaaaagtacagtctggtcagcccagaataaaagctagcttcggccgtaaggctaaaaggaccaagattctggagagattcaagggcaacaagcagcacaagcctttcatacataattcattatatgggccaggaaccaaacaggactactgtaaataagttcctgtctcttgaccaacaagaggttaccagtgaaaagagactgctgtaccagttttttgaataatgacttggggaatccaaaaaaaaacaaaatgaccaagaggtttaaaagaacggtgggatgggtcaggaaaggatggaaaactaaggaagtaaatccaatgcttaaatgaaggaatctgttactttgttatgttataggatttatcttattaaatcattccttggatcatttttaaaggatccttttttaaaaatcataaacctatttgaggaagtgctcaaccacatttcattcttctggagtagaac

SEQ ID NO: 462 - DNA, 1659 bp, Homo sapiens
tggcactaggggcagccactcagcccttcgagctgtaggggaggcgctgcgcccccggccccagccgatcgggggctcctggcgctagcctcgcctccagagcgccgcaggagtccctcctgccgtctgacttgagtccctgctgctgcagtgcacgcccccctttcggcagccagggtggggcccagacccaacctggcccctcctgcccccaccccgcctttgggtcgctgacccccaggctgtggtgagggtctgagagctggtaccacggagcctgggcaacctcctccgcccacccatgcccaccccgcatgaggctgagaagcagatcacagggccagaggaggcggaccggcccccttcaatgtccagtcatgatacagcctctccagcggcccccagccgaagccccatgctgcctgtgctggtgctgatgttgtaactgctcctggaaccaacagcggcggcgcgcgtggcaagcctcccgggagagcaaactgcagcccctcacccatctgcgaagtatgtgccacgccaagtcctgaggaggtgcagagctgggcgcagtcttttgacaagctgatgcacagccttgcgggactcagcgtgttccgggcgttcctgcggacagagtacagcgaggagaacatgctcttctggttggcctgcgaggagctgaaggccgaggccaaccagcatgtggtagacgagaaggcgaggctcatctacgaggactacgtatccatcctgtcccccaaggaggtgagcctggactcccgtgtgcgggagggcatcaacaagaatatgcaggagccgtccgcacacacgttccgacgacgcgcagctgcagatctacacgctcatgcaccgggactcctacccccgcttcctcagctctcccaccttacccgtgccctgcttgctgcaggggccattcacagtccttccttcccgaggccttaggccgccccccagcagcacagaccccgccgcctcctacggccgactctgggttcccttcaggtgttggtgtcggcagggctgtcagggcacatgcctggccggctggggtccccacccgcggaagacggtccttagacccagttgggaagtgctgtgtctcctgggtctgcccacccgtggccaagcaggaactccaggtgcagggcgggcctccaggtgcagggcgggccagaagccccctcatcggcccgcagctggctggcccagtgctcctggctgggggctcttgcgtggtgagagtaaggggtccccccaggagccatgctggacccatgagcctcgttggggcctcctccacaggcagccgatgggccccagacaagcctttggtggggaacagaacctccgcatcgtgtagttttgtgacataaggagacctcttacttgagctgtctgtaccccagaaatcaaacacagaacctcagaaccagatttaggacctcagaatcctgcactcaaggtggcaggacccaatttctgttttatatgtctcatgaactttaaacctggaaacatgtccttactaggtgttttatcaaaaaaaagttttcatatttatctctatccctaaccccccaaaaataggatgtcttattattgaagatatttttaaagcaaaaaaaaaaaaaaaaa

SEQ ID NO: 463 - DNA, 411 bp, Homo sapiens
  misc_feature (1)...(411): n = a,t,c or g
cccacgcgtccgcccacgcgtncggaggaaagaacaattgaaactgcaaaagggattaatggaactgtaaattatgatagtgtcaattctgacaactctaagccaaagatatttaaaagtcaaatagagaacataaatttgaccaatggcagcaatgggaggaacacagagtccccagctgccattcacccttgtggaaatcctacagtgattgaggacgctttggacaagattaaaagcaatgaccctgacaccacagaagtcaatttgaacaacattgagaacatcacaacacagacccttacctccccctccttcttcccaaaggctgccaccacctcctcctcctccccctccttcactcccagagaaaaagctcattaccagaaacattgcagaagtcatcanaca

SEQ ID NO: 464 - DNA, 411 bp, Homo sapiens; identical to SEQ ID NO: 463
  misc_feature (1)...(411): n = a,t,c or g

SEQ ID NO: 465 - DNA, 428 bp, Homo sapiens
atgcttacgggatcacctggcacgctctatgatccgtactgactggggaggaggtttacctcgcggtgtctctttcagccgcaacgtactccgggtcggccttgcgctcggggcctgagaggggcggcggcggggtcaggggccgcacaaataatgaaccagcagtggaagagaaaatactgtaagctggctgactgctggtgaagaaaatgctttatttttgtggcaggcatctgtgggatctgtaataaaaatgatggctggctgtggtgaaattgatcattcaataaacatgcttcctacaaacaggaaagcgaacgagtcctgttctaatactgcaccttctttaaccgtccctgaatgtgccatttgtctgcaaacatgtgttcatccagtcagtctgccctgtaagcacgttttctgctatg

SEQ ID NO: 466 - DNA, 759 bp, Homo sapiens
  misc_feature (1)...(759): n = a,t,c or g
gggatggctgaagagaaaacagtccgtgataaagagtacaaggcccttcaaataaaactggaacggttagagaagctgtgcagggctcttcaaacagaaaggaatgagctcaatgagaaggtggaagtcctgaaagagcaggtatccatcaaagcggccatcaaagcggcgaacagggatttagcaacacctgtgatgcagccctgtactgccctggattctcacaaggagctgaacacttcctcgaaaagagccctgggagcgcacctggaggctgagcccaagagtcagagaagcgctgtgcataagcccccgtccacaggctctgctccggccaatcgagtcggttgactaagatgaggtgtgatcactgaattgagagataaattttgcggataactttctctggtagtagntaactattgggtttcgtggcgaaaaatttactactttttctaccataatctgcattttcttagaactactgaacttatgtggtccaggaggctgcttagcaggcttgatagttaaatctataaaatttcctcagttggggtgccatgacctcgttctccttccactgaatgcgatgggtccttggctgtgccttctctcctggtcctggccatatcatccttagagaattactggcagggcgcccattcagggaactttttgtgaagggcctgatgggacatatataataacacttaaccccccctcattttttcagaaaaaagaaaaatttatatcgcccgg

SEQ ID NO: 467 - DNA, 426 bp, Homo sapiens
tttcgtgggcttatcagcacgcacaccatgcatagctccttaaggacggtgcgacacatgaaaggtgccactgggattcttttcctgcttgtggccccgcccccaggtatagcatcacctgcaagtggaggaggtgcgaattctacccgccgttgggtggggcagacgacccctgcccgtgacggaggggctggtggaagtcaggctttctgacagctggtccaagcgtgcgacccaggctgtatcgcccacttacagccacgtgggctgcggcatgctgggcttccccagcgaaaagagggtcaacgctggcttctacacgcccgtagccgtctaaagggcggggctcaccctgtagagggccgtgtccaagttctgaacggcatcacatttagcacagtgtgggacccccgtgggatttattgg

SEQ ID NO: 468 - DNA, 1103 bp, Homo sapiens
gcggccgcgccggctccaggaaatggttactgctgacaggaagtttggcatccacctcccccagcctcctgagtggacaggggccctgggcaccacttcagagggccatgaagcccccaggaggagaatcgagcaatctttttgtgatttccagaagaagctactccttctagcaggcctaataggatgtcatctaatatttttggaccaacagaagaacctcagaacatactcaagaggacaaatcccccaggggtataaggaagtggtatctttgacgaatcaacccccgtgcagactcgacagcacctgaacccacctgggagggaagaccagcgacatttttgggtctccggtcactgccacttcacgcttggcacacccaaacaaacccaaggatcatgtttttcttatgtgaaggagaagaaccaaaatccggatcttaaagctgcaagggagcatcccggctgggagcagagccaggtgagaaaggcagcgccagataaagcaggccccgccaaggagcaggagcccatgcccacagtcgacagccatgagccccggctggggccgcggtgtcactgtgtctacaaggtacacgacatccctcaaagacgctgactcgatctctaataaaagctatcagcctgtccccctttactacgagacccctcttagctctgcagagcatccatcacagttaggcatttttgcccttttttccatccacccacgctttccaccccaccaagacgtgagcttggaacttatcttgtcatcccagcagcaaggagtcgattttgcatgatggatggaaaacacagagaggaccagctgtttcatttctaggcacctcacttctaacctggaaccggttccgagaggaaggaccaggaagacccatgtgtcgggaatggtggacagaaggagtgtgctcagctgccgccgagaagaccacacgctgggtgctgaaaagagggggggacctgctaggaaccatggccctgggctaagtcggggatgaaggcgggagctgctgtgctggactgcagctcagcacagagacagtgagcctagattgcagagctgcccagggaaggatg

SEQ ID NO: 469 - DNA, 442 bp, Homo sapiens
ctccatgcttggcacgaggtggtgtaggtagatccggggcaggctcaggaccaagtccctctccttccaccaaggagcgcccagaggccggcgggagctccaggttcacctcctcctcctccaggaaatcccacttccaactggatgtctggatgaactactgaaagctgctgagtgtcctgcagcagggtcggtggacctgggtgtctgtctggacacatcctccagtggcctggacctgcccatgaaggtggtggacatgttcaggagctgtttgcctgcgtgtgctgtgaacttcaagtgacggtaagggccatgtagaattgaggagcccgctggtgctcccggcaggcagccagcctccgcaggaccccgaccagcgacacgatggcttctgggcaatacagcacgtctacggtgaaagcttcaggttactgaaagg

SEQ ID NO: 470 - DNA, 783 bp, Homo sapiens
atggcagaaggcaaaggaggagcaaggcacgttttacatggtggcaggcaagagagcatgtgcaggggaactgccctttataaaaccatcagatcttgcctcaagttttgccctccattaagaagggacaccctctttacggattggttacaggatctaattcgcctacaatcaacccttgagtcagaaaaagggattgaagcatcagtaagctctgggaaggcttatatccttggtcaacttcagactgctgtgctggcaggagagctctggatggcatcaggccagtgcccctctgagacgaagtttccagaggaaggagcaggcagcaatctttgctgttctgtatcctccactggtgataaccaggcgaacaaggtcgggggagtggaactccagcaaactgctgcagaactgcagaagaggggcctgaccgttagaagaaaatctaacaaacagaaagcaacaacatcaacatcaacaaaaaggactcccacacaaacctccgtccaatcatcatcagcctcaaagattaaagaaggaaaccttgctcagtggacttggaaagaacgtcatttctttgtgttcaatgtcaaatacccagggcttggtaaaatgttagccatatgggacatggatgaagctggaaaccatcattctcagcaaactaacacaggaacagaaaaccaaacactgcatgttcttactcataagtgggagttgaacaatgagaacacatggacacaaggagggggaacatcacacactggagcctgttggtga

SEQ ID NO: 471 - DNA, 479 bp, Homo sapiens
cattaccagcaacaacggcaacagatgatgtgcctggagcggcatataaaaccacccaaggagctggacacggcctcctcggatgaggagaataaggacggagacttcacggtgttcgagtgcccgggcctggccccgaccggggaaatggaggtgcgcaaccctctgttagaccacagcccacctgctccccgacctcgaggcccccggggaggggcagggcctggagcttcccactaaaaacatgttttgatgctgtgtgctttaggctgggccttgggctccaggccctgggaccccttgccagggagacccccgaacctttgtgccaggacacctcctggtcccctgcacctttcctgtttggtttagacccccaaactggagggggcatggaaaaccgtagagcgcaggaacgggtgggtaattctagagacaaaaaccaaaaaaagtccatttcagaaaaaaaaaaaaaaaaa

SEQ ID NO: 472 - DNA, 4359 bp, Homo sapiens
atggatgagagtacctttgcaggaggccaggaatatggtggatgggtcccagaacaccacaaaagtaacgaacccaagagtggacacattgaaaaaggtaacacagatcagtgccaagaaagaacccctcaacccatgatttatcccacaggggaaattgagagcacagtgaatgcctggatgctcagccatgagaaagaacaaagtcaaatccttttgatatcgaattgccttgacgctttaaagcaccggagctgtgattatggtctgaaaatagctcttgacataaaacacagattaaagattcagcccaagatatttatctatacaaggacacataaatatgcagtcaccctccacatgcttgctcataccattacctcagaaagagatgacatagaggaatggttaaatgcatgggtagtagaccagtgctgtccaccagaaatgtctgtgatgatggaaatgttctatatttatgctgtccactatgggagatcacttctttcttggagtcaggaggaggagaaggagaagggaggcagggaggaggaggaggaggaggaggaggaggaggaggaggaggaggaggaggaggaggaggaggaggaggaggaggaggaggaggcagaagaagagaaattaggggaggcagctgtcccggagggtgtccagctcggatggctgactgctctttcacttgtcgttaacttccacccagtagtcttagtctccccttggacatggtaccgaccgtgtgccattcttatttcacttgaccgagcccgagctgcagcccagggtggaagccgcaagggctgggcagagttccaggcaagagggaccgagaggcgtgagcagtgctccgcagcgcttgtcagagaaatggagcagcggctcctttgtgggctcttacatccccgtcctgggtgcacagcccggatatttgatctaagcgttgcccgttggctagctgctcggtggggatctgcctgccctgggggcgccgcccgcgctccccgcggtgctctcgctcctgggctgcgccagtccgaggcggtgccggctcctttgcctccccgagtcgcagatgctgcgggcgcctccgggaaaagatctgggcggcgcgctcgctcgtgcccaagtcccatggcgagggcagcccgagtggccgtcgcggctgtaggtccgcatgccgggcaccgcaccaggcgtctagcaggtaggggcagggaaggtagggctgcgctggcggccggtgcccagttaccggcgatcggggacgctcggagacacctggtctcccggaagcgcccttcggaaatgggattcgacccggcttgcgggcggcgggtgtttagaagaagaggctgcgggcaagcagtgccccctctctggttccccggactcctcttagccccctcgtggcctgatgggcggccgggacggagagctcatctcaagtttgcccttctctatggagaaggaaaatttgagtctccagaaggaaagtattttgctaaacgccaagcaagaattagaggatggacacaggaagatccagaagctagtggcacatctagcaacagagccagatcagaacccagtgtgttaaccgtggccgggatcttacagacagagagtcgcaaaactgccaaagacatttgcaagatccgctgtctgtgcgaagaaaaggaaaacgtactgaatatcaactgtgagaacaaaggatttacaacagttagcctgctccagcccccccagtatcgaatctatcagctttttctcaatggaaacctcttgacaagactgtatccaaacgaatttgtcaattactccaacgcggtgactcttcacctaggtaacaacgggttacaggagatccgaacgggggcattcagtggcctgaaaactctcaaaagactgcatctcaacaacaacaagcttgagatattgagggaggacaccttcctaggcctggagagcctggagtatctccaggccgactacaattacatcagtgccatcgaggctggggcattcagcaaacttaacaagctcaaagtgctcatcctgaatgacaaccttctgctttcactgcccagcaatgtgttccgctttgtcctgctgacccacttagacctcagggggaataggctaaaagtaatgccttttgctggcgtccttgaacatattggagggatcatggagattcagctggaggaaaatccatggaattgcacttgtgacttacttcctctcaaggcctggctagacaccataactgtttttgtgggagagattgtctgtgagactccctttaggttgcatgggaaagacgtgacccagctgaccaggcaagacctctgtcccagaaaaagtgccagtgattccagtcagaggggcagccatgctgacacccacgtccaaaggctgtcacctacaatgaatcctgctctcaacccaaccagggctccgaaagccagccggccgcccaaaatgagaaatcgtccaactcctcgagtgactgtgtcaaaggacaggcaaagttttggacccatcatggtgtaccagaccaagtctcctgtgcctctcacctgtcccagcagctgtgtctgcacctctcagagctcagacaatggtctgaatgtaaactgccaagaaaggaagttcactaatatctctgacctgcagcccaaaccgaccagtccaaagaaactctacctaacagggaactatcttcaaactgtctataagaatgacctcttagaatacagttctttggacttactgcacttaggaaacaacaggattgcagtcattcaggaaggtgcctttacaaacctgaccagtttacgcagactttatctgaatggcaattaccttgaagtgctgtacccttctatgtttgatggactgcagagcttgcaatatctctatttagagtataatgtcattaaggaaattaagcctctgacctttgatgctttgattaacctacagctactgtttctgaacaacaaccttcttcggtccttacctgataatatatttggggggacggccctaaccaggctgaatctgagaaacaaccatttttctcacctgcccgtgaaaggggttctggatcagctcccggctttcatccagatagatctgcaggagaacccctgggactgtacctgtgacatcatggggctgaaagactggacagaacatgccaattcccctgtcatcattaatgaggtgacttgcgaatctcctgctaagcatgcaggggagatactaaaatttctggggagggaggctatctgtccagacagcccaaacttgtcagatggaaccgtcttgtcaatgaatcacaatacagacacacctcggtcgcttagtgtgtctcctagttcctatcctgaactacacactgaagttccactgtctgtcttaattctgggattgcttgttgttttcatcttatctgtctgttttggggctggtttattcgtctttgtcttgaaacgccgaaagggagtgccgagcgttcccaggaataccaacaacttagacgtaagctcctttcaattacagtatgggtcttacaacactgagactcacgataaaacagacggccatgtctacaactatatccccccacctgtgggtcagatgtgccaaaaccccatctacatggcaggaagggaagggagacccagtaggcctatttaccgaaacctggcaaggagtttcagctattaggcaacctggaggagaaaaaagaagagccagccacacctgcttacacaataagtgccactgagctgctagaaaagcaggccacaccaagagagcctgagctgctgtattaaaatattgctgagcgagtcaaggaacttcccagcgcaggccttagtccactataacttttgtaccttacctaaaagggcagtttgcccctttcctatggaattttcggacggccaaaaccaaggacaggattcaattaaaaccgttttatatggaactcccaggaaatgctttgtggggcagtcaaaacccaaccaccctttactgcaagctaagccgcaatcagaaccggactacctcgaagttctggaaaaacaaactgcaatcagtcagctgtgaagggaaatcatttacaacacgtaaggcatcagaggatgctgctccgaactgttggaaacaaggacattagcttttgtgtttgtttttgttctccctttcccagtgttaatgggggactttgaaaatgttcgggagataggatgaagtcatgattttgcttttgcaagttttcctttaaattatttctctctcgctctcctcttcccactcccacactga

SEQ ID NO: 473 - DNA, 534 bp, Homo sapiens
actcttctggtccccacagactcagagagaacccaccatggtgctgtctcctgccgacaagaccaacgtcaaggccgcctggggtaaggtcggcgcgcacgctggcgagtatggtgcggaggccctggagaggcacttcgacctgagccacggctctgcccaagttaagggccacggcaagaaggtggccgacgcgctgaccaacgccgtggcgcacgtggacgacatgcccaacgcgctgtccgccctgagcgacctgcacgcgcacaagcttcgggtggacccggtcaacttcaagctaagccactgcctgctggtgaccctggccgcccacctccccgccgagttcacccctgcggtgcacgcttccctggacaagttcctggcttctgtgagcaccgtgctgacctccaaataccgttaagctggagcctcggtagccgttcctcctgcccgctgggcctcccaacgggccctcctcccctccttgcaccggcccttcctggtctttgaataaagtctgagtgggcggca

SEQ ID NO: 474 - DNA, 1113 bp, Homo sapiens
atgagagatgactttagagaagcggcattacgtcctgaaaagaaaagtgctaagagagaagcagaagtactaaagaaaatgggaaaacaggagaaggagcgcagcaaaagaaatatcattggatattttgagcaaaaggactcggacaactatagagtttttgaacgagtagcgaatattttgcatgatgactgtgcctttctttctgcatttggggatgtttcaaaaccggaaagatatagtggcgacaacataatctacaaaccaccagggcattctgctccggatatggtgtacttgggagctatgacaaattttgatgtgacttacaattggattcaagataaatgtgttcctcttgtccgagaaataacatttgaaaatggagaggagccctcagagacaatcagggataagtcattgactcattcaactgaggccccgagtggtggctctgactttataatgcaggaattagagcagaaagaagaggcagcgggcgaggaggccaatgatggaggctcaggccacagcctaggccaggaaggccgaccccgcgcgcagaggactcagtggaccggggccgagagcccaatgggaaaggaagttctagatgacggacgacgtgcgggcccagtcccagccgccagcgcctgtccctgtcacggaccccagcgttaccatgcatcctgccgtcttcctatccttacccgacctcagatgctcccttctgctcctggcgcggagtccccgaggcctgagaaaccagtgtcgggggagaatgggagaattagccctgagggactgatacgtagtcacggcgtaggagcttccccttctccccgaagtccgggggtttcggtttcgagggctagtggacctggtggtagcttgaatcggaaaagaccaagcatagacctagcgttccttcccaccctctccatttgggaagagtgtgaggtcgacaggtgctggggttgtgtgactctcactgggtctagatccctgaagcggtgcccgggttggcagatccctctgttgtggcttgatgcgattggttgggaaccccgaactggagactggtttggattccactgggagaatagagtttga

SEQ ID NO: 475 - DNA, 1040 bp, Homo sapiens
ggcccaggagattttttttaaaagtattttttctcccaacatttcccgggtgttccagcgccggttttgaccgccacattaccattttttcacccgagggtcggctctaccaagtagaattatgcttttaaggcctatttaaccgggggggcccttaccttcattagctgtcagggggaaaggactgggcagttattgttcacacagaagaaaagtacttgaccaaattatttggattccagccacagtgacctcactttttccaagataactgaaaaacatttggtggtgtgatgaccggaatgacaagctgacagcagattccagggtacagaagggcacgctattaaagcaagctactggaaaatacaaagtatggctatgaaattcctgtgaccatgctgtgtaaaggaattgcccgatattgttcaggtctacacaccagaaatgctgaaaatgaggccctcttgggttgtggtatgattttaattgggtatagttgaaggagccagggcccctcagggtatataaggtgtgaatcctgccaggttactactggtgggtttaaaagccccactgcagcggggagttaaaacaaacctgaggtcaccccagcctcccttgaaaaaaaaaagtgaaggaaggaaatttggattgggacattttgaaccagaccagtggaaactgccaattacattgcctgttctactgttcttatccaattgatttcacaaccttcagaaatagaagttggagtagtgacagttgaaaatcttaaatgtcaggattcttacagaagcagagattgatgctcaccttggttgctctaggcagagagagactaaacattgtctgttagtttaccgagatccgtgatgccacttacctgtgtgtttggtaacaacaaaccaacatcatggaggtcccctggattgaaaaaaggagccctctcccacctcctccataacaccgaaaggtggtttagggcttttatattaaataaaaaccaggcctttggaaaataaaaaaaaaaaaaaaaa

SEQ ID NO: 476 - DNA, 454 bp, Homo sapiens
gagaacccaaaccagaaattacatggtggtttgaaggagaaatactgcaggatggagaagactatcaatatattgaaaggggagaaacttactgcctttacttaccagaaactttcccagaagatggaggagagtatatgtgtaaagcagtcaacaataaaggatctgcagctagtacctgtattcttaccattgaaactgatgactactagctcccctcccctctccctggaactttctctttcactccaactttcttactacatccatcttttctgtggcggggccaaaaaaggaaaccaggagtgccactatgctgacttcttattccttttcataacagtcttcaaagcacagctcatctaaagaatgcctacttcttttccaaataagcatcagatttatcgcctattatgcagtaacagtcaataaaatgtacttatgggggggaatt

SEQ ID NO: 477 - DNA, 904 bp, Homo sapiens
tgttttttaagggggtcatcccaaaggtctttgaaggaccaaagatagtacttctaaaatttgacagggcttcattttgattttttctccccaaatagttgatagcaataatcaataccagttgagataccaaagaggcagccctttcccctgattccccacacccacttgtaggcctttgcctagaatggtcattaatacgtatgaatcagttgagctaaatattatttagaacgtggcaaaatgctggctgtaaattaaatcaaagataagtaattcaaaggctttaactgaaaatttctgaaaagatgtttgctgtgctattaaagatgttaaataacaaaaattaaaagaactgagaaagactattccatgaaagcgcataatagtgaagaaaaaaatgaagttcccttggcgttagccaggtgcatgcaaatctttttatctgaatgtagaaatgcaaaaagtaccaggagaacatttctgaaagtagtcaagtatgttttaacatttatctccttataatatgcaaactgccaaactggagttatgtttttagttggtaattgatatatatatatatatttgagatggagtttcactcgtcgcacaggctggagtgcagtggcacgatctcggctcaatgcgccctccacctcctgggttcaagtgattctcctgcctccacctcccgagtagttgggaccacaggcgtgtgccaccatgcctggacagttttggggtttttttgtatttttagtggagacagggttttgccactctgaccaggctaatctcgaacccctgacctcaggtgatccgccagccttggcctcccaaagtgctgggattatttgaggtcaggagttagtgatcagcctggtcaacatggtgaaacctcggc

SEQ ID NO: 478 - DNA, 903 bp, Homo sapiens
agtcaggaaatggagcacctgttcgtgtacctccaaagagaacagttaaaagaaatatacccaagctggatgctcagaggtcctttgccgtgtgtactgcgagaatgaagactttttcacagcaatcagactgtcgaccattcccagaaaaatgtcgacattactctgaaagggacgccccagtaatcgtgtaagggccccagagggaacctctgcggaagggacttcattcacatcaaatgtggaacctcagcctttcttggaaaagtaaaaaaagaggctcccgggtttgaccaaatggtggggtaaccggaaagggaactggcctacccgttcgggactatttggtagtcatgtacaggaccatgatccaaggggtgttaccactggggcttccgttaccaagatgagggtcctgtgtatgcctcaccttccccccatccaaccgttggtttatccccaggagaatgggtcctctttgttgaaatcccgaaattttcttgggtgaaaaaattatatcggcagggttcggatggagaccagggtgttgctttgttcagtatctcaaggccaggaaagatgaattaatcccttaaaggaaatgacatttgagcttgtttcaaatttcagcggctttgattcagcaagccccaccaggttaaaaacaaggatatcaggaaaatttttggatgggatttaagtttcttgaaaaaggaactgttcaaccaggcttgattgaataagatctaagaagttacctgggctacagaaagaagatgccacgatgacacttcacgacctacttgtgatatattaaaagatgcaaaaaaaaacacatattagatttggaccttcttcttaaaaaaaaaaaaaaaaaaaactccgaggggggggcccggtacc

SEQ ID NO: 479 - DNA, 1714 bp, Homo sapiens
cgggagtgcgcacattcgcagcccgggcagccctgctcggcaccgggcctcgctgcccgcgccacgccgcccgcagccggcctccaaggatcagtgtggtatgtcagcaccaggggcgtacaccggtgtcaactttgagggggccctcttctctggctatgcacctgacgggggcctctttatgcctgaagagctcccacagttggacagagagaccctgtgccagtggagcacactctcctatcctggcctggtgaaggagctgtgtgccctcttcattggctctgagctccttccaaaagatgaattaaatgatctgatcgaccgagccttcagcagattccgtcacagagaagtggtccatctgtccaggttgaggaatgggctgaacctgttggagctgttgcatggcgtcacatatgcatttaaggacctgtccctgtcctgcacaacacagttcctgcagtacttcctggagaagagggagaagcacgtcactgtggttgtaggaacatctggggacacaggaagtgctgccattgagagtgttcaaggggcaaagaacatggacattatcgttctgctgcccaaaggtcactgcacaaagattcaggagctccagatgacaacggtgctggaagcagaacgtacatgtgtttgggagtggagggaaacagcgattgagcttcgattgagccgatcaagactgtgtttgccgatgtggcttttgtcaagaagcacaatctgatgagcctgaattcgatcaactggtcccgggtcctggtgcagatggcccatcacttctttgcttacttccagtgtacgccatccttggacacacatcccctacccctggtggaggtggttgtgccaacaggggctgccggtaaccttgcagctgggtacattgctcaaaagataggcctgcccatccgtctggtcgtggcagtgaaccgcaatgacatcatccacaggactgtccagcagggagacttctctctctctgaggctgttaaatcaaccttggcatcagctatggacattcaggtgccctacaacatggagagggtgttctggctgctctctggctctgacagccaggtgacaagatccctcatggagcagtttgaaaggacccaaagtgtgaatctgcccaaggaactgcacagcaagctttcagaggcagtgacatccgtgtcagtgtcggatgaagccatcacccagaccatgggccgctgctgggatgagaaccagtacttgctgtgcccccactcagcggtggccgtgaactaccattaccagcagatagacaggcagcagcccaggtacaggcaatgggggcctgggccactgagggaccatttgaatttcaggggccctcttcttctccaagcagtgggagagacaggactacgaaaaaatggctgtaatggagtgtgatgggtgctgtgtggaactgtgccttggaaactgtgggcccagaagagggagcgtgacagatatcccagggacagccatggtcagaggtggtggctgagctggcctccaaccaggaggagcagtttgccaggtagcgtcattgtagcaataagttcaaggtgccaattgtctgtctgtgtctctgtcctccatacccccccatccctaaacttcctctgtttcttattcctcctccaccttctcctttcccatctctctattctctcattggccc

SEQ ID NO: 480 - DNA, 2358 bp, Homo sapiens
atgagggcagtgtcattgcttgtgttggttcttggggtcacaatgtcctatgtaatgccttggcctcaaactgagaattacaccatctacttccctggttctgaggccttcaaacttggacgagccataagctcacttcccagcatccagtatccagggtcttcagcttacagatggcctgttatggagcttctcagcctctataattacgcaaggagggccttgatgggcaacttagcaaatgtcattccctgggggtggtctgagaagatgaccattgagtatttaaatccggggacaggagaacttttaaacaacagccgaggcgatgcgcctcattcagaacatgtgcaccatcgccgagtaccccgcgccggcaacgccgcggcctccgactgctgtgtgggcgccgcggcgccgcctggtcaagatcgccgtggtggggccagcggcgtgggcaagaccgggagccgctgccccttgggagtgggcttagccgttgtctacgccacccgcctgcttccacagacgggggaaacaaggatcaagaatggccaggcagctttctggggacaccggcaccgccgccatcagaactttggggtgtttgagcctctgcaatgcctggcacagaaaggggagttagtgaagctagcccccctgggaggtcttgaagcactggtggtccggttcctcaccaaacgattcatcggtgactatgaaagaaatgcaggtaatctctatactagacaagttcagatagaaggtgaaaccctggctcttcaggttcaagacactccaggtattcaggtccatgagaacagcctgagctgcagtgaacagcttaatatagtgcattggctgtgcacatgctggggggatggggtactccatcactgactacaagagctatgaactcataagccagctccaccagcacgtgcagaagctacacctgggcacccggctgcctgtggtggtcgcggccaacaaagctgacctgttgcacatcaaacaggttgaccctcagcttggactgcagctagccagcatgctaggctgctcattctatgaagagtctgtcagtgaaaattataatgatgtctacagcgccttccacgtcctctgtaaagaggtcagtcacaaacagcagcctagcagtacacccgagaagcgaagaacctccctcattcccaggcccaagtcacccaacatgcaggacctgaagaggaggtttaagcaagccctctctgccaaagtgaggactgtcacctccgtctgaagcaggaggagcactcaagggggtttggtcttcccaaggaagagggcctgaggttctcctagtgcaggaacgttgaatatttggcaatgattcctggttccagaaagggctggagcagaagggccaagagggcctgtggaacttgcttacagaaaaggaagtgtttgtttctgagcagggggacaggatttgattgaggtttgaaaagagcccactgagccactctctgaatatgtgaaatgtactcatgtgtcttttcctttagagtggggagggggcataatccgtttcggtttctgcattcaaactaccttgtaaattggtggtccgttgcaagtttcaccaaatgtattggatgtgatttacagtgggaatgaaagaacagattaagcattgataggctttcttttttcccccttttttcttttttctcttttcttctttcttttcctctttttccccaagaggaaggaattgcttttctcttaccagtatggatttgtaactctgggaacactattcttacagaatgcctttctaacctgaagggatacccagatttctttctttatgtacaagatgggaaaatcccctacccctcaaaaacaggttgagtttatggggccagaatattctgtatacccagaccattgggtaaggctctcatgggttacagggaagggctctgggttccccccctcacagggatgaggcatgcttcagttggggcgtgtgtgggagggagctgtggaacttcacgctccttcaacccccagacttttgactgtataggtttttgtttttttaactgttcccatcaggaaaaaaatgtgtcagttgattttggtgtgacttgtgtaaatggttcatggcaatgacgttgggttgcttcctaggcctggctgagttgtgcctaagggtggctgaaatactaaaacacttattcttacagcaagtgaacaggggctacctgccacatcccctccacagatgcactttaaaaagcccactccatgctttggcttaaactgtaattaatttattttatgtacaataaatcgcatttgaaaaagaaa

SEQ ID NO: 481 - DNA, 343 bp, Homo sapiens
  misc_feature (1)...(343): n = a,t,c or g
ctgaactgttgtaaccttttggttgtctcttgataaagaaagggcattntttgtagcctgttcggtgaccgtaccatttgcaatgccaaccttgataagcccaggaggaggtttttcataaaaggactccaggcgnttgagtngatgcagctgcancncgtcgtgccgccgccgcttctgctnccgggcccgctgcagttcctgatccagcggtcccgcggccaccacgcgcccccagccntcgcatcctcgcgccccggccaggacgacnatcgntgnacctgcggcgcggcnctgctgcggccaagagggcacttcctccgtgcggcccncgttccgaatn

SEQ ID NO: 482 - DNA, 3672 bp, Homo sapiens
atggggtgtacaccttcacacagtgaccttgtaaacagcgttgcaaagagtggcattcagttcttgaaaaagcccaaagcaattcggccaggatgtcagggcggaagtgaaagaggttccatccctttgctggttaaaaactccacctgctatgacgctggggagggcctggcagaggagcagccaagtcccaggaggaaccaaaccacagctaaaggtctttgtcagctcatgggagatcctgcttcaggcaaaaggaaagatatggaaggactgatcccaggaaccaaaacctcttcatcccagctgaacaaatcacaaagccacatggctaaggatattccgttcaagacacagggttcccatggatcacaaggggcagacttttctggagatgagagtgaggaaagtagtacccaagatacttccaaatggaaaaggacagcaaaatgtcacacgtcaagcacacagagccactgctaccaaaccatccaccctgctcatgagcctgaaggcaaagtggacttcccggagcctctggtaaaggcccaccagcaggcttacacctatctacactccagcctctccaaatatgaagcaattctgtgcatcatccatcaggccacccagacccgggagctgctgcagcccatggtcagcttcttgctgctgtgctttgaggagatcagccagctgttgggggagatctccaaggatggagaagtgctcctgcaggaagtcagggaggatctggcttggcctttgaagaaaagagagccccaggagcagccaaatctcctgcaacagctgctacagtacacagtcagcaagctgcaggtgctcaatggcacagtggcctcgctcaccggcagcttcctggagggctccagcagctacctccactccactgcaacccacttggaaaataagctgagcacaaaaaggaatgtggatgaacgcctcctgagggctctgaggcagctagagagcctggcgagtggctgtggcgaccctggggtgcagggtctccccttatgctctgaggacagtggcattggtgctgacaatgagtccgtgcagtcggtggacaagctgggcaagcaaaccagctgggaccttgcaccagagcccgaagaatggaagtcggtgacttcaccccacacagaggccaggcagtcaggacacacctggcagcaaagtccattctgtttgggctcaggcagaccccaggactgcctgctctcaggggctcctatggcaaaggttcagccacgagcacaggacgaagcaaggagcccatgcctctccagtacaagcccagaaaatatcacctccccacctttgaagctggggacaagcaccccatgtgattcctttgggattggggtctctgtggaaccacacctttccaaaacctccaggccgatggacgcttcatctcttagtgacagcgaggacagcagcccagaggaggaggaggaagacaaaatgagcagcatgagtctgtgtgcctggcaggaaaaaactccacattcaaggccacaatcttcacctgctgaccgggaaagcccatttcaggcccgcaccaggaggcttaggagcctccaggcccaggaaatgattctgaagatgaaggagtcaatcagcgaaaggatcaagtttgtccctgtgccctgtgggcaccaggactggtctgaggaggaggaggggaggacagtggtccccccaagacctagcacggtaagtggcagcaggagggcccctgagaggcagacgaggtcccagtcagagtcgtgtctccagagtcacgtggaggaccccacctttcaggagctgcgaagggtccagagggacctcagtcagaagctggaggcattttatgccctgggtgccaaagggcaggggcagagccaggagcaaattctgcagcccagagcagccgccgtgtggcccaatggcacctgcagggtcagtccaagcaacaccaccagcaggctcaaggcatccctcaccaagaacttcagtattttgcctagtcaggacaagagcatcttgcagaaatgcaatccccatcctgaggacgaacaaggcaaagctgggaagcttccaaatgccatcccatcaggagaggtcagtgaggctgccaaggccacagactggaatgtcagaggctgtcccaccagaacatccgtcaagaagcttattgaaactttcagtcccacggagagtctgaggatgctgggggactctaaggacgctggggcaagtccctgcctcaggaattgcatcatgccccccagatttcccaagtacacagggcttgcccctttgtatccgaagccccaaatttctccagcatcaggcagagaatctctcaaaatgggcataggctggaagcccttagcacctatctttccccctctgcctaaagcagaagcagccaagagtgaggagctcagctgtgaaatggaggggaacctcgagcacctccctccaccgcctatggaagttctgatggacaaatcattcgcttctctggagtccccagaaagcagcaagtccacagagaactcccccaaggaaacccaggagccagggccgggagaggctggccccaccaggagaacatgggcttccccaaagctgagggcctctgtgagccccctggacttgctgcccagcaagagcaccgccagcctgaccaagcctcacagcacagggccagggagtggcaggagcagctgccagcccaggaagccagccctggacctgagcagcccaccagccaccagccaaagccccgaggtgaagggtgggacttggagtcaggcagagaaggccaccagcctctacaggcagccccggaaggccatcgcctggcaccactccggccctccatctggacaaaacaggacctcagagtccagcctggccagaccaaggcagagccgagagagaagcccccctgtgggcagaaaggcctctcccacgaggacacactgggtgcctcaagcagacaagaggcgccggagccttccctcctcttacagacctgcccagccaagcccctctgctgtgcagacgccccccagcccacctgtgagccccagggtgctaagcccacccaccacaaagcggcgaacttccccaccgcaccagcccaagttgcccaaccctccccccgagagtgcacctgctcagtgcaaggtccccagccccccaacccagcacccagaagcaagcccccctttctcgattccctccccatcacccccaatgtccccttctcaggagcacaaggaaacaagagactctgaagacagccaagcagtcatagccaaagtgtctgggaacacacattccatattctgcccagctacctcctctctgtttgaagctaaaccgccactctcaacagcccacccactgaccccaccatcgctgccgccagaggctgggggccctctcgggaacccagcagaatgctggaagaacagctcagggccttggctgagagcagactcgcagcggagagcagctctgtgtgccctcaaccctctgcctttcctcaggaggacagcttctgaccgccagccaggtggccgaccgcagcctcccaccttggaccccaccagcacctcttatgaatcccagctcggccagaacaggtaa

SEQ ID NO: 483 - DNA, 395 bp, Homo sapiens
tgcgaaggcaactccacgtgctcagagaacgaggtgtgcgtgaggcctggcgagtgccgctgccgccacggctacttcggtgccaactgcgacaccaagtgcccgcgccagttctggggccccgactgcaaggagctgtgtagctgccacccacacgggcagtgcgaggacgtgacaggccagtgtacttgtcacgcgcggcgctggggcgcgcgctgcgagcatgcgtgccagtgccagcacggcacgtgccacccgcggagcggcgcgtgccgctgtgagcccggctggtggggcgcgcagtgcgccagcgcgtgctactgcagcgccacgtcgcgctgcgacccacagaccggcgcctgcctgtgccacgcaggctggtggggccgcagctg

SEQ ID NO: 484 - DNA, 1044 bp, Homo sapiens
  misc_feature (1)...(1044): n = a,t,c or g
cgcttaacctgagctgtgctgacgtggtctggcaccagatggatgagaacctgctggccacagagccaccaatggcgtggtggtcacgtggaacctgggccggccatcccgcaacaagcaggaccagctgttcacagaacacaagcgcacggtaaacaaagtctgcttccaccccaccgaagcccacgtgctgctcagtggctcccaggatggcttcatgaagtgctttgacctccgcagaaaggactctgtcagcaccttcttcgggccagtcggagagcgtgcgggacgtgcagttcagtatccgggactacttcaccttcgcctccaccttttgagaacgggcaatgttgcagctctgggacatccggcgtcccgaccggtgcgagaggatgttcacagcccacaacggacccgtcttctgctgcgactggcaccccgaggacaggggctggttggccactggagggcgcgacaagatggtgaaggtctgggacatgaccacgcaccgtgccaaggagatgcactgtgtgcagaccatcgcctcggtggcccgtgtggagtggggccagagtgccgccaccacctggccacgtgctccatgatggtggacacaacatctatgtttggacgtgcgccgcccttcgtgccagctgcatgtttgagacaccggacgtcacacgggattgctggngcaccccacgaccctcttctgtgtttggtcagacagtcgtggccagcctgttcggagcagcagccgggcgcgcacctgggccttgtacgccttgggactgctcgcgcaagaaccctggtcgatggggaagctacttggacgggccccctttttaagaaatggccgcaggcttaactccctccgcctagttttaaaacaagaggggaccgtttgtgcaaaaaattctcttgccgcgtgcgttgtacacagaaggggattccaagggaaggcatgtgttttccctctcccgcaccacagaggggtgtgcttctatatcatatcgtgtggagtgccagagtcaatcttctccg

SEQ ID NO: 485 - DNA, 1044 bp, Homo sapiens; identical to SEQ ID NO: 484
  misc_feature (1)...(1044): n = a,t,c or g

SEQ ID NO: 486 - DNA, 225 bp, Homo sapiens
cataatgccctcaacatccagccatgtcgtagaatgggccaatgtggctttgtgaagcagctggagattcctcagtatggctacagaaacaatgtccccacaactacgccgcgttccaacctggccaaggagctcgagaaatattccaagacctcgtttgaatacaccattaacgacaaccatacttatgggggactagggtgcatgagaccacgcttagtgtga

SEQ ID NO: 487 - DNA, 568 bp, Homo sapiens
atgcctcagcaagtacaaaatcatggaaatcgtaacagtctctcagaccacagtgcaatcaaattagaactcaggattaagaaactcactcaaaaccacacaattacatggaaactgaacaatctgctcctgaatgactactggataaataacgaaattaaggtggaaataaataagttctttgataccaataagaacaaagacacaacgtaccagaatctctgggacacaggatttccaatttccaagcctgatgggctctcccagctggaacaggatctacaggtctttgatctggaaactaagactagagaagtcttaagagatgacttctcagagtttaggcaaataacaatcagcaaagaagccttcaccagtgagaagaacaatgaatgtaataaacctgaaaaaagcttcagtctggactctactattgatgcagatcagaaagttcttagaatacagaacactgatgataatgataagaacgacatgagcttcagccagaattcagcctctggtaaacatgaacacataaatctaacacaggattttcagagtagtatat

SEQ ID NO: 488 - DNA, 570 bp, Homo sapiens
  misc_feature (1)...(570): n = a,t,c or g
cgccctcgacnccntnnntttagaacnactatccagagggtggaattcgattgggatcctggttttcagaaatgattggagtgatttatgtaagttgggaggggttttttgatggggttggtaaggtcttacgttaaaggaaaggtatacagagataaatattggtacttgagtcattagctttcaaagaagcctggggtaatggaggaaaggtaagaattgattctgacagaatcttgagatgggcagaattaacatctggaagaggtcacagtgtcctgatttaccttacctgtgtccaggatggccaggccatgttatgggatctcaacgaaggcaaacacctttacacgctagatggtggggacatcatcaacgccctgtgcttcagccctaaccgctactggctgtgtgctgccacaggccccagcatcaagatctgggatttagagggaaagatcattgtagatgaactgaagcaagaagtatcagtacagcagcaggcagaccaccccaggcacctcctgcctgtctgtgatgccaaactctgttgtgctacacgacacctgn

SEQ ID NO: 489 - DNA, 479 bp, Homo sapiens
aatagaccgcttgtagaactctgacgagccggccaggaattccaggctcacaaggctatcttagcagctcgttctccggtttttagtgccatgtttgaacatgaaatggaggagagcaaaaagaatcgagttgaaatcaatgatgtggagcctgaagtttttaaggaaatgatgtgcttcatttacacggggaaggctccaaacctcgacaaaatggctgatgatttgctggcagctgctgacaagtatgccctggagcgcttaaaggtcatgtgtgaggatgccctctgcagtaacctgtccgtggagaacgctgcagaaattctcatcctggccgacctccacagtgcagatcagttgaaaactcaggcagtggatttcatcaactatttaggcgctggcccgaggatatcccagcggtggtacttcggagacacctgtctgcatctgactgagcagaacaaatcgtcaggtgcctg

SEQ ID NO: 490 - DNA, 393 bp, Homo sapiens
tttcgtgttgtgtctgagccgagtagtggaaggcggttggaaggaggtgtagcgtgagactggactgcccgcattgggtacatgcgcagtgccgctcgcgcgggccgcgccaatcctgcagcgccttcaacagtctccacgtacgtccctcaaagcgcgtcctaaaacccggataaccggagcgctccccatggaccacacggagggctcgcccgcggaggagccgcctgcgcatgctccatcgcctgggaaatttggtgagcggcctccacctaaacgacttactagggaagctatgcgaaattatttaaaagagcgaggggatcaaacagtacttattcttcatgcaaaagttgcacagaagtcatatggaaatgaaaaaaggtttttttg

SEQ ID NO: 491 - DNA, 425 bp, Homo sapiens
  misc_feature (1)...(425): n = a,t,c or g
aaacactttaagatgagaaaaattgatctctgtctgagctctgaagggtccgaagtgattttagctacatcaagtgatgaaaaacacccacctgaaaatatcattgatgggaatccagaaacgttttggaccaccacaggaatgtttccccaggaattcattatttgtttccacaaacatgtaaggattgaaaggcttgtaatccaaagttactttgatttggtacacacagaggggcagcttcaaaatgaagaaattgtggctcccatcccaaattatggaagtactgggcatctttgaagaccagctcaaatgccaccagctccaaaaagcattgttggattcacccagctcagaggattgctgtctcctctgtgccctctgagcacttagtcttcactctaacatatactccaccttgagtn

SEQ ID NO: 492 - DNA, 425 bp, Homo sapiens; identical to SEQ ID NO: 491
  misc_feature (1)...(425): n = a,t,c or g

SEQ ID NO: 493 - DNA, 423 bp, Homo sapiens
tggtgttcagttgtggcggttgctggtcagtaacagtcaagatgctgcggaatctgctggctcttcgtcagattgggcagaggacgataagcactgcttcccgcaggcattttaaaaataaagttccggagaagcaaaaactgttccaggaacagcatatgccatatatgagctggctgtggcttcatttcccaagaagcaggagtgacttcagtcatcccagcaatcgcttggttcagtttcattcagctctctatggaccagtaatctgataaataaccgagctcttctttggggatcaatatttattgacttggagtaactgccaccaataaagcagtctttaccatgatcaaaacactttacctgcgaggtaagggttcatcgtcgcaaataatttctcccctctctaacacatcctgc

SEQ ID NO: 494 - DNA, 972 bp, Homo sapiens
gcgcctgcggaattccgcacgagcggagaggctgctggctctggggaaaggagagagcagcccagtgtgacagagcgagtccccacggctctgggagtgcctcgcatgtgtgtggcccaggtcctgacagcccacctactccctccccggcaggcactgggctccctctgctccccgtgggccgctccccgcgtggggccactgcccccggcccccgccatggtgcggatttcaaagcccaagacgtttcaggcctacttggatgattgtcaccggaggtatagctgtgcccactgccgcgctcacctggccaaccacgacgacctcatctccaagtccttccagggcagtcaggggcgtgcctacctcttcaactcagtggtgaacgtgggctgcgggccagccgaggagcgggtgctgctgaccggcctccatgctgtcgccgacatccactgcgagaactgcaagaccactttgggctggaaatatgaacaggcctttgagagcagccagaagtacaaagaggggaagtacatcattgaactcaaccacatgatcaaagacaacggctgggactgacccccgctcccccgacgcatgtggctccagcccggcctgggccgccagggagccgccactggcttcccgccacccgaagggagctctggaccctcagagcccctgcagaggacggatctagctcctgtatatatattttattgcatgcactgtgaccttggggggagaacagaagggggacgacgcccccgcacctcctgcgatctggctggcttggatctcgtttttaacccgttcctgccccacctgccctatagttatggcctgtgttctgctctcctggtcccagtgcaccgtttgctctgtgaactcctcccaccaggcccttcttaccccacgcgtgtctgtccccctcgttctgtagcgtttgtacataataaaacaatggaatgg

SEQ ID NO: 495 - DNA, 476 bp, Homo sapiens
gcctcccttctgggatcttagtgcagacagctgcgaggactgtcatgatggcaccagatgcaccaagtgatggtccatatcttcctgtggcaactttacccacgtaactgacaaaattggaaataacacttgaggctggattcgatgtgaaatatctgatcattgtccgctgcagagaaggtactctccataaacagaatacaaggacatttgcagctataatacctgtcacagtccgctggccatcacttaggttattccaccacttgttaatcccaacagtaaaaaataaaggttttatgagactccttataggatagggagaaggataaaagactgtttcttccacaggaggaatcaaagcacttctcttgtatgcttcaccacttgtccctgggtctgatcttcgaggttcaaccttcctgggtgcttttctgaatccgcatttttgttgaataaagaagttaaacctgcgt

SEQ ID NO: 496 - DNA, 1026 bp, Homo sapiens
tttggggccagagtgggcgaggcgcggaggtctggcctataaagtagtcgcggagacggggtgctggtttgcgtcgtagtctcctgcagcgtctgggggtttccgtgcaggccctcgaaaccaggacccttcgcgtgccctagccgagttatggccgacgaaggccgtgatgcgtgctgaagggcgacggccccagtgcagggcatcatcaatttcgagccagaaggaaagtaatggacccagtgaagggtgtggggaagcatttaaagggactgactgaaggccttgcatggatttcatgttcatgagtttggagataaatacagcaggcttgtaccagtgcagggtcctcactttatccctctatccagaaaacaacggtgggcccaaagaatgaagagaggcatgttgaagacttggggcaatgttgactgcttgacaaagatggtgttgggccgatgtgtctattgaaagattcctgtgatcttcactcttcagggagaccatttgcatcatttgggccgcacactggtggtcccatggaaaaagccagatgacttggggcaaagggtgggaaatgaaagaaagttcaaagacagggaaacgctgggaagttcgtttgggcttgtggtgttaatttggggtccgcccccaataaacattccccttgggatgtagtcctgaggcccccctaacctcatcctgttatccccgcctagcctgtagaaatgtatccctgataaacatttaaacactgttaatctttaaaagtgtaattgtgtgacgtttttcagagttgctttaaaagtaccctgtagtgagaaactgatttatgatcacttgggaagatttgtatagttttataaaactcagttaaaatgtctgtttcaatgacctgtattttgccagacttaaatcacagatgggtattaaacttgtcagaatttctttgtcattcaagcctgtgaataaaaaccctgtatggcacttattatgaggctattaaaagaatccaaattcaaaaaa

SEQ ID NO: 497 - DNA, 480 bp, Homo sapiens
ggcacgaggtggcggccgggcagcatggcggggctggagctcttgtcggaccagggctaccgggtggacgggcggcgcgccggggagctgcgcaagatccaggcgcggatgggcgtgttcgcgcaggctgacggctcggcctacattgagcagggcaacaccaaggcactggctgtggtctacggcccgcacgaggcgagtgggcgcgcgggatggggaatcgtgtggccgtgggagctgcggggcagccgggctgagcgctggctcggggacttgaggggcaacggccggcgcgcctcagtctacacagccgatgctcagcaccgcatctcactcggagtaaacgcaagtccttagtgtgctgcgcggtggtcctgcctttctcatcggcctctgtccctgcgccctccttcctctttgcggctcttcaacgtgctaggcactcccccactcgctccctctcctttcagctctactccg

SEQ ID NO: 498 - DNA, 791 bp, Homo sapiens
ctgagaagacacaggtggaatccacatggaagaggccccagaaacctacattcccagcagggctgtatctttgttcttcaactggaagcaggaattcaggactctggaggtcacactccgggatttcagcaagttgaataagcaagatatcagatatctggggaaaatattcagctctgccacaagcctcaggctgcaaataaagagatgtgctggtgtggctggaagcctcagtttggtcctcagcacctgtaagaacatttattctctcatggtggaagccagtcccctcaccatagaagatgagaggcacatcacatctgtaacaaacctgaaaaccttgagtattcatgacctacagaatcaacggctgccgggtggtctgactgacagcttgggtaacttgaagaaccttacaaagctcataatggataacataaagatgaatgaagaagatgctataaaactagctgaaggcctgaaaaacctgaagaagatgtgtttatttcatttgacccacttgtctgacattggagagggaatggattacatagtcaagtctctgtcaagtgaaccctgtgaccttgaagaaattcaattagtctcctgctgcttgtctgcaaatgcagtgaaaatcctagctcagaatcttcacaatttggtcaaactgagcattcttgatttatcagaaaattacctggaaaaagatggaaatgaagctcttcatgaactgatcgacaggatgaacgtgctaaaacagctcaacgcacttgagctgcccctggggctgg

SEQ ID NO: 499 - DNA, 952 bp, Homo sapiens
tttttaatgtagaaatactttattgctgaaaaatgctaatgatcatctgagccatcagtgagtcatagctttttgttggtggagaatcttgccttgatattgatggtttctaatagaccagggtggtggttgctgaaggatggagtggctgtggcaatttcttaaaataagacaacaatgaagtttgctgcatccatgtactcttctttccatgaacaatttctctgtatcatgcaatgctgtttacccacagtacaacttctttcaaaattggagtcagtcctttcaaaccctaccactgctttatcaactaagtttctgtcatagtttaagtcctttgttgtcatttcaacgttgttcgcagcatcttcaccaggagtagatctcatctcaagaaaccactttctttgttaatccctatgaagcaactcctcatccatttaaatttgatcatgagatagcagcaatctagtcccattttcagggttcacttctaattcaagttctcttgctgtttctaccacatccacagttacttcctacaatgaaattttgaaactgtcagttataaaagtcagaatcaacttcttccagacccctgttaatgttgctattttgatctccttccatgaaacatcagtgtttttattggcatctagaatgctgaattctttccagaagattttttctttgcccagattttggatctgggcaaagaggccaggaattcttcctaacatctgcaatgcccaggagagctcctccccaacaaaggattatccagccaaaattgtcaatagtgaaaaggctgagaaatcctatactggagaaagcatgtggaaacagagaagaaaaaaaaattaaaagacagaatgggaacatattaggtcaaaagccagaggagtcaagcatacccaatggctaaaaaaaaaaaaaaaaaaaaaaaaaaaaa

SEQ ID NO: 500 - DNA, 2967 bp, Homo sapiens
atgaggagagaccccacgccgcccaggggcctcccgcggcagaggccgacgccgagcccaaggacacgctcccggggacaccaaagccaaaggccaaaggccaagtccgagccccagcccgcgcccgcggcgacccccggaggccgaagggcgtgggaaccacgggcgcaagccggctgcccacccccgccccgggccgcctctcccaggagattagtgcagggcgagcggccggaatccgggaaccgtagccgacaggcagcttacccacgccgcgccagccgggcacgaacctgcacaacgcgacttccaccaaccttgcgccagcgcgcactgacgcagcgcccatgctcggtacccaggaccaatagaaagctccgaaggggacctgggccaatcacattgcgccgccctgagtcgtgctcccgccccgcgtttgctacggaggcccacgacgcccaggcgcttccgcgaccacccggagtgattgcccggcagagcgcgatgcatagagctctggctgctttaaaaaataaacctctaaatcatgttcacaaggtagtcaaggagcgtctgtgcccttggttgtgttcacgacaacctgagcctttcggggtcaaattccatcatgcccattgtaaaaagtttcattcgaaaaatggaaatgaccttcatccactcggtggaccagtgttctctcaagtatctgactgcgacaggcttgaacaaaatgttaaaaatgaggagagtcagatgttttacaggagactgagcaacttgacttcatcagaagaagtgctaagttttataagcacgatggaaaccctgcctgacactatggcagcaggagctttacaacgaatttgtgaagtggaaaaaaaggatggtgatcaagggctgccaaaagaaatactggagaatagcatctttcaagctttatgctttcagtttgaaaaggagccctcacagctgtcaaacactagtttagtgactgctttgcaagctctgattctgttgcatgtggatcctcaaagtagcctgttgctgaacctggtggcagaatgccaaaatcgtctcagaaaaggtggcatggaagttcgcaatctttgtattcttggggaaagtctgattacactgcacagttcaggttgtgtgacactagaactcattataaatcaacttcaaggtgaaaaattggaaacatttaccccggaggatattgtggccctttatagaatcttgcaggcatgtactgaaaaagtggatgaacaccaaacatttttaaataagataaacaacttttccctatcaatagtttccaacctgagtcctaaattgattagccaaatgctcactgccctggtggttcttgatcaaagtcaagcatttcctctgattataaaattgggcaaatatgtcgtgaggcatgtcccacatttcactaacgaggagcttaggagagtcttggaggcgttcatatattttgggcaccatgacacattttttacaaaagccctagagcatcgtgtagctgcggtgtgcctcacgttggatcctgaagttgtctgcagggtcatggagtactgcagtagagaactgattctttcaaaacccatcctcaatgcagtggcagaaacttttgtttgccaaacagaaaaattttcacctcgtcagatttctgccttaatggaaccatttgggaaactcaattatttgccaccaaatgcctctgctttatttagaaagctggaaaacgtgctattcactcatttcaattattttccacccaaatcattattgaaacttcttcattcatgttcacttaatgaatgccatccagtcaactttctggcaaaaatattcaagcctcttttccttcaacggctgcaagatgttgaaattaaattagatgaagaaggatttgtattgccatccacagctaatgaagatatccataaaaggatagcactgtgtattgatggtccaaaaaggttttgctccaatagcaaacacttactggggaaagaagctattaaacaaagacacctacagttactcggttatcaagttgttcagcctctgctgatcctgtctcatttggctctcccctaccctcttcacgtacgcattcagcagacagttctgatcacgctgggcacactcaatgctccagctctagggccaaataggaaagagcccctgcccttgaggggcttgaaacagggctcctcggacaccaaggaggcaagacactccaggggagactgtgaggccctggggcagtggtcgtacaagttcaggagtcaacaactgaaggagcgagcctccaccgagcagacaggagcaagtgatgaaacatgcctccatgttgatcctctggggcaattcttcaaggcctctccaggcccctcagaaaggttcatgaccattcaccagttgccttcagcagtgacctgggcgggggcgctggacggtggcggcatggaggacgacgaggaggagaccaccgcgtccacgctgcggggcaagcccaggccgccgcccgtctcggcgcagtccgccttcagctacatcccgccgcggcgcctggaccccaaagagcacagctactactaccgcccggcgcgggtgaagaaggtctttgcttcccctttgctttctgccatgattacaggaattatttccctctatgattgtatttttaagaggcgcctagattatgatcagaagttgcaccgagatgacagagaacatgcaaaaagcctgggacttcatgttaacgaagaggaacaggagaggccggttggagtgctgacgtcttctgtctatgggaagcgcatcaatcagcccattgagcccctaaaccgggactttggccgtgccaaccatgtgcaggctgacttctacaggaagaacgacatccccagcctcaaggaacccggctttgggcacattgctccatcctga

SEQ ID NO: 501 - DNA, 1227 bp, Homo sapiens
  misc_feature (1)...(1227): n = a,t,c or g
atgaggaaagagcagaagatggaaggggacacctatgagattatgcagggtggggggagggagcgcacgacgtgcgcgcaccctctcccctcgtccaccgctgccgcctccttcttctgccgctcctggtgctgcttgtgtgcctcgtttggtgcggacctgcgtacctcttyttgtgaaagcggcagctgaggagactccggcggctcgccatggcccgacgaaaagcccaaggaaggagtcaagactgagaacaacgatcatattaatttgaaggtggccggggcagrgatggttctgttgtgcaagtttaagattaagaggcatacaccacttagtaaactaatgaaagcctattgtgaaccgacagggattgtcaatgaggcagatcagattcccgatttgaccgggcaacccaatcaatgaaacagacacacctgctacagttgggaaatggaaggatgaaagatacaattgatggtgttccaacaagcaagaccgggaggtgtctacttgaaaaagggaacctgcttcctttactcccagaactctgtttctttttaaaggacccaagattactgcattctcaattaggaaaacttgcaatttgggttccacccacaatccctgacttacttaccctattagttttctcttattcttttcatttccccctttcccccattcctttatttgttacataaagtaactgggtatatgtggcaccaagccatattggcattttttttttttttttttaactaaacagccaaatggtatgttttgattgaccatccaagtgggagacccgggatgggggaaaaattactgattctgtgaaaaatacccccctttctcccattagtggcatgctcattcagctcttaccctttatattccagtaagttattttgctctcactgttttaacaaccacaacaaaacaacaacaacaacataaaaatccttgcataccttgttcaattggatgaattttaatgtttttcatttatcattgtaaaaccaaggacgaattttataacttttttggtacggtagctgttaccnatgtagggcaatctcgtctttaagtagggattaaattactcnctaaaacaaaaaagaatcctagatagttttcccttcaagtcaatgcgtcttggttgtttaaataaacttcttgtttaaaatgaaaaaaaaaaaaaaaaaaaaaaaagggcggccgctc

SEQ ID NO: 502 - DNA, 2085 bp, Homo sapiens
gcgaaaactcgcctctgcccaaggctgtgcggggcgtccgcccccgcacttcgctgattggccgcactagcccgctcgtcacgctcttttgtctcagctggcagaggataaaagccgccgcggctgccttaggaacggcgctgcctcgtctctgctacccctggttgggcggccctgcgaagcagctccttcgggcagccccgggtcgcttagcggccaaggaggcttcagttctttgccgcctgcaaggcggagaccagaaggcggaatccacagctggcgacgcgggagcatctgctgtccaccagcggagcacagataccctatcgtcgtcagtcatggctagcatcattgcacgtgtcggtaacagccggcggctgaatgcacccttgccgccttgggcccattccatgctgaggtccctggggagaagtctcggtcctataatggccagcatggcagacagaaacatgaagttgttctcggggagggtggtgccagcccaaggggaagaaacctttgaaaactggctgacccaagtcaatggcgtcctgccagattggaatatgtctgaggaggaaaagctcaagcgcttgatgaaaacccttaggggccctgcccgcgaggtcatgcgtgtgctttcaggcgaccaaccctaacctaagtgtggcagatttttttgcgagccatgaaattgggtgtttttgggggagtctgaaagcagttttgactttccccatgggtaaatttttttaacacccttacaaagctcaagggggagaaagcttccctttatgtgatccggtttagaggtgcagctccagaacgctattcaggcaggcattatagctgagaaagatgcaaaccgggactcgcttgcagcagctccttttaggcggtgagctgagtagggacctccgactcagacttaaggattttctcaggatgtatgcaaatgagcaggagcggcttcccaactttctggagttaatcagaatggtaagggaggaagaggattgggatgatgcttttattaaacggaagcgtccaaaaaggtctgagtcaatggtggagagggcagtcagccctgtggcatttcagggctccccaccgatagtgatcggcagtgcttgactgcaatgttgatagagataggtgataccctcgacgactccgatgaaggatgtgatcctggtggagtctcaggaccctccacttccatcctggggtgcccctcccctcagagacagggccagacctcaggatgaagtgctggtcattgattccccccacaattccagggctcagtttccttccaccagtggtggttctggctataagaataacggtcctggggagatgcgtagagccaggaagcgaaaacacacaatccgctgttcgtattgtggtgaggaaggccactcaaaagaaacctgtgacaacgagagtgacaaggcccaggtttttgagaatttgatcatcactctccaggagctgacccatactgagatggagaggtcaagagtggcccctggcgaatacaatgacttctctgagccactgtaagggaccacccccaggtttcagtgaacccttacctatattcagcatccagtagtgggaaaactggggtgggggtgggggtgggacttctaactgcatgaattaatccacaaagcggctatcttttggggtggagtagaaagggtcttggataccagcacattggagggagatagccctgaccctctggcccctgctcccttctcccctgcagcccacgggtctgttttcctgtgtgtgccccatttcccttgacagctttattcctttgtgaaagtggtataatttattgttaaatatttgaacaataaaaaaggtacaaaaagtgaagtacaaattacccaaatctctccacccttatataatcattgtcaaccctttgatgagtgatatttccctatacctatgtacccagatagatatatgcatagataaaagtgatgaaatataagtgctgttctatctgtattttttcaccaaacaatatatgttgtgagcttctatgtcaataaatatatatat

SEQ ID NO: 503 - DNA, 460 bp, Homo sapiens
aaattgggcagggacagggcattctctccagcaggtgactgggcatgaccactacaatgctgatctgaaaccgatcgatgggttcaatggaaggtttggctaccgcaggaacactccagccctccgtcagagcacgtccgtcttcggagagagacctgatcgtatggtttctgtgctcaacagaaaactctctgcagaggaattagagcgaaaacggcaagagatgatggaaaacgccaaatggagggaggaggagagactgaacatcctcaagaggcatgctaaggatgaggaacgggagcagaggctagagaagctggactcccgggatgggaagttcatccaccgcatgaagctggagagtgcatctacttcctccctggaggatcgggtgaagcggaatatctactctttacagagaacttcggtagctctggagaagaactttatgaaaagatga

SEQ ID NO: 504 - DNA, 460 bp, Homo sapiens; identical to SEQ ID NO: 503

SEQ ID NO: 505 - DNA, 465 bp, Homo sapiens
aatgtcataaaatgttgacttactgattccaaattcatccattacacttttaagtgatcgtccagcttcaattctacttagaaccttcattttctcctccaaattcagtgttgtatatttccctctcttattcatactgaatttaactctgaaccaccagcaggagaaaacaaagggaaaagccttaatgaattggcaaaaaaaaaaacccacattttttaaacaaaacttagctgaaagccccaaaaggcatgggcattgtattggaggataatggactgaaggggctaaccatgactgaagagctagtctagagggggaggtcttatgcactcaaaaagctgccagttgcaaagtcctgtctggctcttgctcctgcaagccatgagtgatcatttttcagaatgccccctacctctcctctcttttgacagatacaacagcctcagtcaggaatgacaggaa

SEQ ID NO: 506 - DNA, 2229 bp, Homo sapiens
atgggccatgtgagtagtgacgatgggcacagtgatgaggatgagctgaggaaatccctgtctgagctggtggatgacaagttcgggacaggcacgaagaaggtgacgcgaatcctggatggtggcaaccccttcctggatgtcccacaggcgctcagtgccaccacctacaagcacggcgtcctgacccggaagactcacgctgacatggatggcaagaggacgccccgtgggaggcgtggctggaagaaattctacgcagtgctcaaagggaccatcctgtacctgcagaaggtgagagactgccccagagaccttactcacccaggggcctctgactacagcaagaagtccaacgtgctgaagcttaagacagccgactggagggtattcctcttccaggcaccgagcaaggaagaaatgctgtcctggatcctcaggatcaacctggtggcagccatcttctctgccccggccttcccagccgctgtcagctccatgaagaagttctgtcggcccctgctgccctcctgcaccacccgcctctgccaggaggagcaactgcggtctcatgagaataagttgaggcagctgactgcggagctggccgaacacaggtgtcacccagtcgagaggggcatcaagtccaaggaggccgaggagtaccggttgaaggagcactatctcaccttcgagaaaagccgttatgagacctatatccacctcctggctatgaaaatcaaagtgggctcagatgatctggagcggattgaggcccggctggccactctggaaggggatgacccttctctccggaagacacattcaagccctgccctcagccagggccatgtgactggcagcaaaaccacaaaggatgccactgggcctgatacttagctgacatggatttgcagaccccagggtgggcagatgtctccagtggggtcagtgagcacaattccagccaggggccacttggaccaagctccagtcagttgatgggcagctagaggggtgcagaaagcctgtgggcccaggagatggagatgccgtttgtggcgttgatctccttgcgtccttgggcatctccgggcatcagaccctctccctggcccttgttttcctctccaccatggagcctcattttgtaggccagtttgtgtgcatgctatagacaccacctcgctggagaagctgaaagggctgttgtcttcccaggtctttctcttctcatcaagctcctctcctcatcttttttgtgtgtgagggcaggtcttgactctagggtctcagctgggaaccccaccctttctcctcctccttcctctgagttgaccagcagcaggtctgccgaccaccagcaccatcctctcctcccagcagcctccagaaccatgcccaggtctcctgcctcacatcacaataatctgggacccaggcttgtgccctttcagtgtaaagctgactccatcacatgtgcatccacttcttttcatccattgagatcacactgcctcctttttatacagacacaaatatacatctataagaataatatatacataaggaacccctgtaaagatggttttggaactggaatcagttagaggatgaaatcagataaaggaaaagcctattttggagcttcccctgttaggaaggatggctgcacctggccccctggcattcctgacgctctaggagggaagggggaggcagtgctggcctcccttgccctgtttttccctcttccagctgacctgtgacttatactggctcttacccgatgatacttttgggaaaaaatagagcgtgtatgcactgccccgtttgtcccatgggatatcccgggggtgttaagtccggatgggtaccacgggccctgttttatatttggggtctttatgttggtgctgccaggtctctgagctccagaggtggcctcttggacagatctactgctataggaataaaagacactctgtctcgcaaatggccgcttgtcaacaagcccaaagatgcttgtcggaggacggttatggaagcccttaattcttggttgtgggaaaaggtggaatgacaagttattgattgtttttctgtcgctatttctttcatttgtctagtgaatcagaaaggcttagcaaggccacatctgggaagagtggagaaatttgccacttgacgatcacggattagctagcacctttaagccctgcatttctc

SEQ ID NO: 507 - DNA, 1434 bp, Homo sapiens
gctcctcttacagatagtgcggcggcccaagcgtcgcgtctacccgggggattacagtaacccggctgtcagtgatgagtcagagagcggggggctgatgctgctgccatttcatcacctttgcgagcgcagcatccatccctccgctctcccggggcctgggcctacccagcttcgggctctcaggccagcgatgcgctcgcggctgagctagatcctgccgagccgcgctctctgaggcgtcggcggggcgccccctcccgccgttcccgggccgggccaaggagacctgcagagccgcggccatggaggccatctggctgtaccagttccggctcattgtcatcggggattccacagtgggcaagtcctgcctgatccgccgcttcaccgagggtcgctttgcccaggtttctgaccccaccgtgggggtgggattttttctcccgcttggtggagatcgagccagggaaaacgcatcaagctccagatctggggataccgcgggtcaagagaggttcagatccatcactcgcgcctactacaggaactcagtaggtggtcttctcttatctgacattaccaaccgcagctcattccagaatgtccatgcatcttggcaagagcccaaattacacgttcaaccctaccaaattgtacttgttctggtgggtcaccaagtgtgacctggatacacagaggcaagtgactcgccacgaggccgagaaactggctgctgcatacggccatgaagtacattgaaacgtcagcccgagatgccattaatgtggagaaagcccttcacagacctgaccaagagacatatatgagctggttaaaaggggggagattacaatccaggagggctgggaaggggtgaagagtggatttgtaccaaatgtggttcactcttcagaagaggttgtcaaatcagagaggagatgtttgtgctagtcagttcttttatttccaaaacatgctctcctacttgaactgaaaagtaagagaaataaatagaatctttgtgtaactgatgagaactcaacctccatttggataccaagtgagcctccctctcagggggactctgacagactcgtgtgcgggtggatgggggtgcctgagtgctgtgaccaagggactgaattgctgacatgggccaggccaggcactgttttgtggcccatgctaggcagtggctgctccatgagccctttgtggaccacatgttaaaggcctggggtttaggaagctaagtcccaggaaaacatacctacagacaggacaactgttccttggtatttgagctcacttataggccatgaacataaagaaatacataaaggggaaaaaagtttcacaatggggacaattagcataactaaacaaagattatgagctctacttattccgtgagaataccctgcaccaaag

SEQ ID NO: 508 - DNA, 441 bp, Homo sapiens
ttctgaaaaacaaaaaaaacatttatttctgtaaactgtctgagtgcagagatgttctttacaatcccaatacagtacagatttcttccccaaaacgaaatgagcaaggaaaaacagaaaaagagctatatcaaatgtgctcatgaagaaccaagccaatctcacctttctttaaaaacaaaacaaaacgatccttttgattgtgtggtgcagacgcaggactgaagccacaggcttttggggtgctgtgagcccagggctttgctcagctcacagctagcgcggcgggcagagcaacccttcggcccaagccatcctcgcagcttgcacagaagcttcctgaacctaagggatccgtgcagcaaagccactgccaggtaagttttaaggcaaattttatctcttcttattcagtctgagccggacctaaccttctcacca

SEQ ID NO: 509 - DNA, 456 bp, Homo sapiens
aatgggacgatttcgtcgtttgtgcccggggtaaccccgttccgtgccaagccgcttcagcgggggacgtacccatgaaggaagagaaggagcacaggcctaaggagaagcgagtaaccctggtaacccccgccggggccacgggcagcggtggtgggacctagggggacagctccaagggggagagataagcaggatcgcaacaaggagaagaaagaagcgctgagtaaggtggtaattcgaagattacctcccactttgaccaaggagcagcttcaggaacatcttcaacctatgcctgagcatgattattttgagcttttttctaatgatacgaggttgtatgctcatatggatgcccgaagcttacatcaactttaaaaaccaagatgacattattttgttcaaggatcgctttgatgggaatgaattccttgggaataaaggtcaagaata

SEQ ID NO: 510 - DNA, 3731 bp, Homo sapiens
gaattcggcacgaggagattatcaaagtgacacctcttcaacaaatgcttgcctcatgtactggagctatactgacatcagtaatagtgacacccctggatgttgttaaaattagactccaagcccaaaacaacccactccccaaaggaaaatgttttgtatatagtaatggactcatggatcatctatgtgtctgtgaagagggaggcaacaaactatggtataagaagccaggaaatttccagggaacattggatggcattttttaaaatcattcgaaatgagggcattaaatctctatggagtggccttcctcctaccctagtggtggcagttcctgccacagttatttattttacctgctatggttcaattaagtgctcttctgagatctaagttaggagaaaatgaaacctgcataccaattgttgctggaattgtagccagatttggtgcagtaactgtgataagtccactagaattgattagaaccaagatgcagtccaagaagttttcttacgtggaactgcatcgatttgtcagcaagaaagtatctgaagatggttggatttccctttggaggggctgggctcctactgttcttagagatgaaccttttctcagcaatgtactggtataactatggaattttaaagaagtggttatgtgagaaatctggtttatatgagccaacatttaatgatcaacttttacttcaggggcattgtctggttcttttgctgctgttgcaactttaccatttgatgtagtaaaaacacaaaagcagacacaactttggacatatgaaagtcataaaatttctatgcctttgcatatgtcaacctggattataatgaagaacattgttgctaaaaatggattttccggattatttccaggccctaattcctcggcttaattaaaattggctcctgcttgtgccattatgatcagtacatatgaatttggaaaggctttttttccagaaacaaaatgttcgaaggcagcaatactagtgatgctgtttcaacttgaaacaacaacctatagccaaagaagaatggagactcttaaggcaagaatggtttttcaccattaattctctcacaaatgattttatgtctttctttcctataatttaaataaaccatttcagctctacctctaaatcataatggtaaaataacttttgtcttattgttggtgatattgaaaaagatattgtagaaatcacccccattgagcattcttgtaaaaatagattcctccttagcatcaaaagcagtctcttgaaagtttaatattatatgtttcagtgtaacataatcttactgggagtgtgttgaatacgccagaactttttgaattgtgtgctgaatgatgtacatagtctagaagaaaaaagcccaagtcttgtgcacatttaaatcgtgtacataagtatttccgtatttcagtaaagtagataaagcactcgttaaatagcattgtttacatcgaccaaatattgcctgtttcctttaattcaaatgcattaggttcccgcctccctctccttccccgccatgttgctgttttaaggcttcatatgtattaacatttctctgatcaaaattgtggctgttttccttatgaaccataatataatcatttgtgtgatgtacattgtgccatttttgatgactaaatgtctatatttttgccattcctgtaagagagggagtttttttactgatagtagcaaatgttcacttcagtcaaacttgggtgttcagtggtaaaccatatagtatttagactggtaaaaatagtttgcacacaggaatagcctctgatttttagctctcttgtaatccaagtatcattgttcatggaattctctaggtcatttttattgtgttgttctaacaagacagattattgctacaacaatagttacaagacatttctaaaatatcctttgatttttactctaagtatggtagagtaagaggctaaacaagaagctgtttccttgaagacattgctttcagtcaccatacatgtctaaataatttagcttatcattcattctatgtaggaatgagataagaaaggatatgatggcaggaaaagaaatgctattcattttttatactttagttttattttcctagggatctatatcctatatatatatattttttaaagcactaatttattgcagtctttattttagaaaaatgtgaagcatttttttctcccctaaaatgaatatatttagatgacaagtctttagtgctggtagaggaactaattgattttgtactatagtaggaaagtgtttatatgtttcaccagaaataaaatatgtagggtttgtatgtaatcttctgtgtttatcctatgttgatttaccttaaatttgcaacatacatatcccacataaatattccatgactttcttatatttcattaaaatgttttatggcttccttaaaatcatcactgtgcttcctaaatatttttacgtaaaatcattgtataatgctatactgtgatatacatgaaagtttatcttgaccagtgctctttaccaatattaaatttaaattttatttgggttttgctatgcttatgggtaattcatagaaaacagaaaaaatactgttcccaaaaggcagttatatatttcagtttaatatcacctataagtatgagaaaggtttccatgtctcctacccctcactgcacttaggaaaattcttatttatgaataaagtaagataagtaaatctaattgcctagtcgtttttttaacacatatacatgcaatgtatctggatgaatagaaggctgaattgaagctttctttatatttaagaggtaaaaagaaatattaatacttttaaaatatactaacaaccaaaaagtgttcagaattttgctatagtaataatttgtattaaaatagtacctagaaaaattcagtctatggaataggtaaaattttaaaattttaatttgctctcagagttctgtctgataaaataattgaactataattggcatgatgaatattcccaggttttacttcagtatataaatttaactctcagccacatgggctttccagacttttcaatacatatgatgttgcaggaattgcaatatttgcaaacatgtgccacaacagtgttcttgtgtgatgtttctaaaacagtttttattctattaatgttaaattttctaacataaacatttaattgattaatgtaaaattttaggaaggaacatctttaattttcaatatgagatggttgcaacctttaaagtagtacatatttgattttttttaaaaggcaatatttttttttctaggaaaactattcattatggttatttaactgcatatgttttttaaatttttccctctcggaacaacatgtactggggcctatcaaagggtggagggtgggaggagggagaggaacaggaaaaataactaatgggtactaggcttaatacctgggtgatgaaataatctgtataataaatccccatgacacaaaagtttacctgtgtaacaaacctgcatatgtacccctaaacttaaattcttccctctttttgtcttgggcacaagtttttgggatatggaaaagtttattgtatcccttttgaattttcttctaagatgaactttttaaataaaagatattactgcttttaaaaaaaaaaaaaaaaaaaac

SEQ ID NO: 511 - DNA, 3562 bp, Homo sapiens
atgttacatcatccttcccaaggattccgctttggaactgtccgagaaagcagtgctgaagattatgtgagacaaagtttcccagagatgcatgaatatatgagaaggtacaatgttccagccacccctgatggagtggagtatctgaagaatgatccagagaaactagacgccttcatcatggacaaagcccttctggattatgaagtgtcaatagatgctgactgcaaacttctcactgtggggaagccatttgccatagaagcctttttctttcttctgagtcaggaaaggggtgctgatgaggcaagattccgaacatttgtggattcctggccgtatactactgctcatgacatggattctttagaatttagtgatccatctcatcatcttgactgcccattgggaaagacgctcaatctctacccatgtggattttcttggaattcctgtaagctccaagggctcccacttcacggaatgaaatgtgaagtccacttggggccagttaattctttccaagatagtcaaggtgttccactgccaggcaccaggaacacttgtttccctggtgttgaccatcttacttcatttacaggaaaacgactgtcttcttctgccaaaatgtcaggaattggaaataaaagagcagctggagaacctggcacctccatgcctcctgagaagaaggcagctgttgaagattcagggaccacagtggaaacaattaagctaggaggtgtctcttcaacggaggaactagacattagaacactgcaaaccaaaaatcgcaagctggcagaaatgttggatcagcggcaggccattgaagatgaacttcgtgagcacattgaaaaactggaacgacgacaggccactgatgatgcctcactattgattgtcaaccgatactggagtcagtttgatgaaaacatccgtatcatccttaaacgttatgatctggagcagggcttgggagacctactcacagaacgaaaagcccttgttgtgcctgaaccagaaccagactctgatagcaatcaggagcgtaaagatgaccgagagagaggcaagtgggaagggcaagagccagctttctctttccttgctactttggccagcagttccagtgaagagatggagtctcagctgcaggaacgtgtggagtcttcccgccgagccgtgtcccagattgtgactgtttatgataaattgcaagaaaaagtggagctcttatcccggaagctaaacagtggagataatctgatagtggaggaagcagtgcaggagctgaactctttcctcgcacaggagaatatgaggctacaggaattgacagatcttcttcaggaaaagcatcgcaccatgtctcaggagttctccaagttgcagagtaaagtggagacagccgaatcacgagtgtctgtcctggagtccatgattgatgacctgcagtgggatattgacaaaattcgaaagagggaacagcgactcaaccgacacttagcagaagtcctagaacgggtgaattccaaaggttataaggtgtatggagcggggagcagtctgtatggcggcacaatcactatcaatgctcggaagtttgaggaaatgaatgcagagcttgaggagaacaaagagttggctcagaaccgtctctgtgagctggagaaacttcggcaagactttgaggaggtcactacacaaaatgaaaagctgaaggtggaattgcggagtgcagtggagcaagtcgttaaggaaactccagaatatcgctgcatgcagtcacagttctccgtcttgtataatgagagcctacagttgaaagcacacttggatgaggctcggaccctgcttcatggcaccagaggaacccaccagcaccaggttgagcttattgagcgagatgaggttagtcttcataagaagctgaggactgaagtaattcagctagaagatacattggcccaggtccgcaaggagtatgaaatgctgaggatagaatttgagcagacccttgctgccaatgaacaagcaggccctataaacagggagatgcgccacctcatcagtagcctccagaatcacaatcaccagctgaaaggggaggtcctgagatataagcggaaattgagagaagcccagtctgacctgaacaagacacgcctgcgtagtggtagtgccctcctgcagtcccagtctagtactgaggacccgaaggatgagcctgcggagctaaaaccagattctgaggacttatcctcccagtcctcagcctcaaaggcatctcaggaggatgccaatgaaatcaagtctaaacgggatgaagaagaacgagaacgagaaaggagggagaaggagagggaacgagaaagagaacgggagaaggagaaggagagagaacgagagaagcagaagctaaaagagtcagaaaaagagagagattctgctaaggataaagagaaaggcaaacatgatgatggacggaaaaaggaagcagaaattatcaaacaattgaagattgaactcaagaaggcacaggagagccaaaaggagatgaaactattgctggatatgtaccgttctgccccaaaggaacagagagacaaagttccagctgatggcagctgagaagaagtctaaggcagagttggaagatctaaggcaaagactcaaggatctggaagataaagagaagaaagagaacaagaaaatggctgatgaggatgccttgaggaagatccgggcagtggaggagcagatagaatacctacagaagaagctagccatggccaagcaggaagaagaagcactcctctctgaaatggatgtcacaggccaggcctttgaagacatgcaggagcaaaatatccgtttgatgcagcaattgcgggagaaggatgatgcaaatttcaagctcatgtcagagcgtatcaagtccaatcagatccataagttgcttaaagaagagaaggaggagctggcagaccaggtgttgactctgaagactcaggttgatgcccagctacaggtagtaaggaaactggaagagaaggagcatctgttacagagcaacattggcacaggggagaaagagctgggtcttaggacccaagccttagagatgaataaacgcaaggcaatggaggcagcccagcttgcagatgacctcaaagcacaactggagttggctcagaagaagctacatgattttcaggatgagatcgtggagaacagtgttaccaaagaaaaggacatgttcaatttcaaacgagcccaggaggacatctctagacttcgcaggaagctggagaccacaaagaaaccagacaatgtacccaagtgtgatgagattctgatggaagagattaaggattacaaggcacgcttgacctgtccgtgctgtaacatgcgtaaaaaggatgctgttcttactaagtgttttcatgtcttctgctttgagtgtgtgaagacacgctatgacacccgccagcgcaaatgtcccaagtgtaatgctgcttttggtgccaatgattttcatcgcatctacattggttga

SEQ ID NO: 512 - DNA, 467 bp, Homo sapiens
  misc_feature (1)...(467): n = a,t,c or g
tagtgccattagaaaccgcattttcctacgtgaaggctgacaatcactatgaacaaattattactatgaacatacctctatttttgcagttaacctctcaatttcagaccgatcttccctgtgatttttggtatttcctgttcacggattttcaagcaagtttttagagcatgtgtacgtccttcccattcagattttttatgagccaccattatgtcaatctgtttcatgagctcctgtagttctgcttcgcaagatgtcaaaaatcccccaccatgccctcgattttgtattccttctaacaaagcctccatcaccaaatcccctttgttttggcaactcgggccggcgctgcgcacaaacgccacaaaaggctttcgtccagcctctcgaaatcgtcgacccggaattccggtccggtncggcgtgctgacgcttacaaataatctctttnnntnggggggggg

SEQ ID NO: 513 - DNA, 996 bp, Homo sapiens
atggcggccacaccccctcatcgcgcgggacccaacccatgcagacacagtaggcacctcagcgagggacgcgaggagacgcgcacacacccacactcaccacacacccacggagggggtgtggaaggccccgctcccccggcatctcggctgcagcgggacaaggtgacacatccgggagcccggcagcgcgccgggtgtgcactcacccgggcccgccgcccgcgagcctcggacgcgggcagcagcagcagcagccgccgccgccgccgccgccacctccggccctccacgtcagccgacggcgggagggagcgggtggcggcgttgaagcgagtactttacctcgtgtgggcctttattcctgaatcttggctaaactctttaggtttaacctattggcctcaaaaatattgggcagttgcattacctgtctacctccttattgctatagtaattggctacgtgctcttgtttgggattaacatgatgagtacctctccactcgactccatccatacaatcacaggtcatgaaaggaacaccaatgttttgcaaactatgggcagcagtgtttttgagggtcatgatcagtttagtgttacagtcacaggggaccctatggccagggctggaagaagccagctagagcctcacagtgactcagatgccacactccaattgcactgtagtcagcccacttgtgtcataaagcctgtttacacaaagcctagcatattagaagcagctgtgagtcagcctgcttcagctgctgctgctgccccaagaggcccatctctccctgtgatactttggtttctaaggcaacctcttttgaatgttctcagtgaatgcaccatgggtgggcacatcctggggaaagttcagtcactcactcctcaccaccattctgtgaaggatttacgcacctggcaagaattaaaatgcagtgtctaccttattgctgatggagcccgattttcaagtgctgcataa

SEQ ID NO: 514 - DNA, 380 bp, Homo sapiens
ccgattcgccgtgtggcgggtacgatttccgccttttgactctggcctctaggccctgagccccgggcgggctgcatttgtcggggaaacctttcctcgaccaggggcacctctactcgaccaggggcgacggcggactttgggcttcatcatggaggactacctgcagggttgtcgagctgctctgcaggagtcccgacctctacatgttgtgctgggaaatgaaacctgtgatttggactacccaggggctgctcttgccctggctttttacctagcaaaggaaccatcatcctggactgtgtcaacaaggaccttaaaaatggaaaggcaaccccaaaggacagtaaatatgtggagaaactaaaagcccttttttc

SEQ ID NO: 515 - DNA, 859 bp, Homo sapiens
cgactacagaaacgctatgtattagaggaagctgagcaactggagcctcgagttaatgctctggaagaggacatggatgatgtggagtccagtgaagaggaagaataggaggatgagaaggtggaaagagtgccatcacctgatcaccgccggagaagctaccgagacttggacaagccccgtcgctctcccacactgcgctacaggaggagtaggagccggtctcccataaggcggagtcgatctcccaaaaggagaagccccttccctcgccgagaaaggcatcggagcaagagtctcaagacgtcaccgcagcaggtcccgagatcggaggcacagatcccgttccaagtccccaggtcatcaccgtagtcacagacacaggagccactcaaagtctcccgaaaggtctaagaagagccacaagattagccggagtagggaatgagtaatggactcagtttggttttagtccacatggcctcctgtggatataaggatatctgtatgtggaaggattaagatctcccccaggcagctataagaatattttagtttttttcttatcaagtttctcaacctttatttttaatgaaggaggtgctgagttttgtatctttttaatcataatcaacatcagtttttgacccaactaaccttgactgtattcaaactttatggggagtataaaggatctggaggttggggatatgactgacaaggaaaggctgtggccacatgatgacaccttttctcatttttaaaaaaccggacacacatgttacccatttcgctgtagtttagtttttggtttgttgtggttggagctgctttgagaatcatgcgcgtggcgaaatcc

SEQ ID NO: 516 - DNA, 303 bp, Homo sapiens
  misc_feature (1)...(303): n = a,t,c or g
cctagcctaaaatgaaatgtagtttgcctntcttgtgatttgaagagaagcagcagtctttacttttccagccaaatccagtagcagaatcatcttccacaacaaggaattaaaggcggagggatttctctttcctgagctcaccaaacttattccagtgttgnatcgcaagctgttgatgcacaggcgtcttgtggcaagcccagcntcagtttatgttagacaatcagtacacatgctggtgtgttttccaatggccagtgataagnaattaaataagtatttgtgagatttgctattttt

SEQ ID NO: 517 - DNA, 2782 bp, Homo sapiens
tgcggccgcaatagtacgctcgcgcggcggtggcgggtggtggtccttggaacgcggtgggcggacagcggcacggcctcccctcccctccggacgcaagccgaagtacgtgagaggagacttccggccactgcgttgtagtcggcccggctgcaaagcgtttttctgcaggctgttttcccaggttccctcggcctgtacctcgcgcactcctcattgctccaggtccttcagtctccgctcgtctcaccgtaggctgtgacgacatgagcaacaaagaaggatcaggagggttcaggaaaaggaagcatgacaatttcccacataaccaaagaagagaagggaaggatgttaattcatcttcacccgtgatgttggcctttaaatcatttcagcaggaacttgatgcaaggcatgacaaatatgagagacttgtgaaacttagtcgggatataactgttgaaagtaaaaggacaatttttctcctccaataggattacaagtgctccctgatatggaagatatattgactgaatcagaaattaaattggatggtgtcagacaaaagatattccaggtagcccaagagctatcaggggaagatatgcatcagttccatcgagccattactacaggactacaggaatatgtggaagctgtctcttttcaacacttcatcaaaacacgatcattaattagtatggatgaaattaataaacaattgatatttacgactgaagacaatgggaaagaaaataaaactccctcctctgatgcacaggataagcagtttggtacttggagactgagagtcacacctgtcgattaccttctgggagtggctgacttaactggagaattgatgcggatgtgtattaacagtgtggggaatggggacattgataccccctttgaagtgagccagtttttacgtcaggtttatgatgggttttcattcattggcaacactggaccttacgaggtttctaagaagctgtataccttgaaacaaagtttggccaaagtggagaatgcttgttatgccttgaaagtcagagggtcagaaattccaaaacatatgttggcagatgtgttttcagttaaaacagaaatgatagatcaagaagagggcatttcttagaatctaacgttactcagttactaattcttttgagaactcctaagagaccaatttgtaagacttatttagtatttcatttaactttattgtggcttttacatagaaacatattcagttgtacttgttttaaattgtatacaagctgtacataaaattagccaaatgaatcatttcttatatcttattcatgaaagtttgcatacagatgtttgcatatatgcctttttgaatttttgctggttaacctttatcatttatctttgtaatgggaacatgcttcagagtgtaccttttgccataacctattttaatttactttttctgaaggttggagtgataatttttagtggaagcaatttgtaatttaagttggtagttatattatatatagaaaagattttttagttaaacttctggacatgagcgtcctgtttaaatttcttgttaatatcgcgccaagcctcaaaaataggcttattccatggaacaagaattaaaaatgaataagctatcaatatataatttaagtacaagtttaggctgggcgtggtggctcacgcctgtaatcccagcactttgggagggccgaggtaggcagatcacgaggtcaagagatcaagaccagcctgaccaacgtggcgaaacctcgtctctactagaaatacaaaaattagctggatatggtggtatgtgcctgtaatcccagctacttgggaggctgaggcaggagactcgcttgaacctgggaggcagaggttgcagtgagccgagattgcgccactgcactccagcctgggtaacagagcaagactccatctcaaaaaaagaaagaaagaaaaaagaaagtacaagtttataaagtattatagtgaaaaattcgcattctggctgattttaagccatttaaaatttatataaaacaaccttccataaaaatttgacaggtgcccagatgttgctttctccatttattttttgtttttttttaatcacagtaggtctgatagagaattggagctaaattataatatttttgttggtaaagttgagttatatacttgtacatacaatggaaatgcttttagctagctgattatttagcaatttttgtttttgttatattaggcatgtttggaggctttcctattctagcatttaaatttaaattttattaaaattaaataatttaaatctagcatttaaatttaaataatttaagtctagcatttacttttaaataattataaatgaagttttgaaatactaaggtgaatccagacctttagttgtcccatgggtgttaattaaagttgccaaagaagatgtattatggaaccaattcagcaataagacaattgtccaacacagttggagaataacaatgggtaaccgttagtaaatatttagaattggaatttgcctactgaaatagttatagatgattacttgtgatgtgaaactgaattgagcatgacaaccagacatttccagttggttttgtaagttttgagaatctagatactgggttttattttttgaaagattagctctgtttgtaagggctgattccttgaaaatgtaattttccagaaaaacacctaaagaaaataaaacatggacatgcctagtaaaaaaaaaaaa

SEQ ID NO: 518 - DNA, 497 bp, Homo sapiens
gcatggaccatgagtttgttgctaagggacatttgttccgtaagggcatcatgaagattatggtgtacaagattttccgcatcctggtgccagggaacacagacagcactgaggccttgtcactctcctatctcgtggaattaagtgtggtagcacccgctgggcaggacatggtctctgatgacatgaagaacttcgcagaacagctaaaacctctggttcacctagagaaaatagaccccaagaggctcatgtgactaagaggatctgtccacatttggggcctatccttacttgtttgaaaaaatatgtttgcactccagcctgggtgagaagagcgaaatccgtctcaaaaaaaaataaaaatgaagaggggaaaccagaataaattatcttttggaaaggacaatttcttgtttggccatttgtgtataaggttggtaacattagaggctgtgagcttgtgttacatggtaataaagccaatgaagagaaaa

SEQ ID NO: 519 - DNA, 1185 bp, Homo sapiens
cccacgcgtccggggaatacttccaagttgtagtgttgttgttttcagcctgctgctgctgctgctgttgcggctaggggaaccgtcgtggggaaggatggtgtgcggagaaatgtgaaaagaaacttggtactgttatcactccagatacatgggaaagatggtgctaggaatacccacagaaaattggtggaagaaagctgaatgaaaataaagctttgacttcaaaaaaaagcaagatttgatccatatggaaagaataagttctccacttgtagaatttgtaaaaagttctgtggcaccaaccaggttctcatttactgccagcggctgtgcctacaaaaaaggcatctgtgcgatgtgtggaaaaaagggttttggataccaaaaactacaagcaaacatctgtctagatgtattgatggaatttctggctttctaaatgattttactttcttgccttgaattttcaaggcatagatgtcaacttaacagataacatggttttaagataaattaagtttaaaccagagaatttgattgttactcattttgctctcatgttctaaacagcaacagtgtaactagtcttttgttgtaaatggttattttccttataagaattttaagaactaagtggcaaattccatgaaaatatttctcagttctgtatgcacttttatttaacattattccatataattctccccccacccactttatttataggatactgcaaaagtgaggaaggagataatagatactttgctctgaatttgggcatccagagttaacatttctcccctcactcccttgctgggtgtccataggttattaggaatcaggcagcctctttaactaattggcgggtttcataggatatataaatgtttcaagccattattgctgaatggttctttagttattaacctagacccaaatcaaagaccagttggatttatgatattttttatttgttcttgcagccaaagtgccagtttctttaatatgtgaccaagaacacaaggagcatccatatggccaaataaatacactgaattttagaaaaacatattactttgaattcaaattgtcatgaaaaccagaacagtgtttgtccatgttgcatgtaatgaaaataaatgccctgcctctgagaaaagcatctttcaagtcaaaagccag

SEQ ID NO: 520 - DNA, 456 bp, Homo sapiens
gtgattccacagattcaaaaagtgtgtgaagttgtagatgggttcatctatgttgcaaatgctgaagctcataaaagtccaggatacagaggctgaaactctgactggttttttgaatggcattgagtggattcttgaagaagtggaatctaagcgtgcaagatgattctcttttcagatcttgggaactgaaaccatttgaaatttattactaaggtcgtgatgtgaatatttgctcagtcagcccaccttgtcctgcctttttgcagataggctttcatttggacagctataactgctgtgttttttatattatttttactctttaccataaatcaattacaagaaaagagtttcagtcctagtatttagccccaaaatgaacctttaaacatttttttggtaatttttatattttctgtctttttaaaaatattaaattctggaaaaaacaaa

SEQ ID NO: 521 - DNA, 485 bp, Homo sapiens
cgaaagcggccaagtaaagctccgtcctgtatcttccgcctcccgtgggctccggccggctaagccgcggcggacaactatgctgaaagccaagatcctcttcgtggggccttgcgagagtggaaaaactgttttgaccaactttctgacagaatcttctgacattactgaatacagcccaacccaaggagtgaggtttgagccctgctggccggccctgatgaaggatgctcatggagtggcgatcgtcttcgatgctgacattccaagccaccggaaggaactggagatgtgggattcctgcttttgccaacagccgtccttacaggacacacagtgtatgctaattgcacaccacaaaccaagctctggagatgataaaggaagcctgtctttgtcgccacccttgaacaagctgaagctggtgcactcaaacctggaagatgaccctgaggagatccggatggaattcataaagtatttaa

SEQ ID NO: 522 - DNA, 792 bp, Homo sapiens
atggggtttcgccatgttggccaggctggtctcaaactcctgacctcaagtgatctgcccgccttggcctcccaggtccagtgtaaactcgtggtccctgcatctgcagaaaggcacatttcccctctgcagcgcggactgattgcgttctcgctgcgtccagatccagggctcgccggcgacagagccagtctcggggtcccactgtgcggataccggattggtaatccgaggcggagccctaagcgcacacgccattgcgcccggacagcggctgtctcatgctctgcatacagcaagtgcttatatcaattcaggccgaatgtgggacacagtgcatctaccccaaaagcgatgtgtcagaccacggccgcaggggagggtgcgcacgccgcggacgagggctacacacaaagagtagtgggagcgaggcgagggacacctcaacgctacacgggcggggcagagactaagaaccgagcctttcgcagctaccccaaaatggagacctcttggccgcgcggcggagggagcaccccgcctgtagcactggatgcacaagtggagcgcgagtgcgctctagggtctggcgcgcagggcaagcactcgtgcctggctgtgcgggttgtgcttatattttgcattaacgaacattacccccaaacactcacctaccgattacctttcgtgcttcctctccgctcagggggaaccccaacctcctggagagctctgttctttcccagttccagcgactctaactgtaagctctgtgggggcacgagctcatag

SEQ ID NO: 523 - DNA, 609 bp, Homo sapiens
atgcctcgcccccagcgcgcgctcccggcgccggccccgccccctcacccaggcggcgccgtaaagccggagaaggggcggggtctcagctcctacttcattctacggccgagaccggaggatgttccctgctcaggaggaggccgacaggaccgtgtttgttgggaatttagaggcccgagttcgggaagagattctgtacgagctgttccttcagtgctgcagcttccttactatgaaatgacagctccacttcctaatagtgcatccgtgtcttcctcactgaatcatgttccagatcttgaggctggacccagctcatataaatggactcaccaacaaccaagtgactctgacctttatcagatgacagctccacttcctaatagtgcatccgtgtcttcctcactgaatcatgttccagatcttgaggctggacccagctcatataaatggactcaccaacaaccaagtgactctgacctttatcagatgaataaacgaaagagacaaaagcaaacaagtgatagtgatagtagcacagacaacaacagaggcaacgaatgtagccaaaagttccgaaagtctaagaagaagaaaagatactag

SEQ ID NO: 524 - DNA, 3333 bp, Homo sapiens
  misc_feature (1)...(3333): n = a,t,c or g
acatggagatgtgtcacccagatgcctcttcaaggaaggatctgctgcccagctgcagaccctagagttagcaggcagcctccatctgtcagctccttcaggatctgccaaagccactaaagtggaatcacttcagtcgagaatatatattcacctgctcgttgtcttgatggcagtgacagcctgtctggagcagctgctgaggggatgccagctgcagtatggaaggcgtggccagagctgcccactcctcagagacagcgggcgccaggaacatgcaagagccccgtcccctaccacgtcagcgaggcgggagacccatgttcctgggcacagctgcagccgtccagccgcagctctgcacccagccatccctgcactcttgggggcccaggaaaccccctgcccctgcaggctgaaagtgcctgctcctgaggttgcagttcacagcatgtccgcctcggcccctgctgcggagggggagggaacccccacccagcccgcgtccgagaaaagaccccgaaatgcccggtcccagagaggagagcgaggaggaagaggacgaggacggacgaggaggaggaggaggaggaaaaagaaaagagtctcatcgtggaaggcaagagggaaaagaaaaaagtagagaggttgacaatgcaagtctcttccttacagagagagccatttacaattgcacaaggaaaggggcagaaactttgtgaaattgagaggatacatttttttctaagtaagaagaaaaccgatgaacttagaaatctacacaaactgctttacaacaggccaggcactgtgtcctcattaaaagaagaatgtgggtcagttcagtggctttccatttgaaaaaggaagtgtccaatataaaaagaaggaagaaatgttgaaaaagtttagaaatgccatgttaaagagcatctgtgaggttcttgatttggagagatcaggtgtaaatagtgaactagtgaagaggatcttgaatttcttaatgcatccaaagcgttctggcaaaccattgccgaaatttaaaaagtcttgtagcaaaggcagtaaaaaggaccggaacagttctggaatggcaagtaaggctaagcgaaccaaatgtcctgaaattctgtcagatgaatctagtagtgatgaagatgaaaagaaaaacaaggaagagtcttcagatgatgaagataaagaaagtgaagaggagccatcaaaaaagacagtcaaaagagaggaaacctaaacagagggctacttctaaaagtaaaaaatctgtgaaaagtgccaatgttaagaaagcagatagcagcaccaccaagaagaatcaaaacagttccaaaaaagaaagtgagtctgaggatagttcagatgatgaacctttaattaaaaagttgaagaaaccccctacagatgaagagttaaaggaaacaataaagaaattactggccagtgctaacttggaagaagtcacaatgaaacagatttgcaaaaaggtctatgaaaattatcctacttatgatttaacttgaaagaaaagatttcataaaaacaactgtaaaagagctaatttcttgagatagaggacagagaagatgactcgttccctatagatttgaagatctgatttataccattataccagcaaagagaatgtatttccttttctaaatccttgttaagcaacgttagtagaacttactgctgacctttttatcttgagtgttatgtgaatttgagtttgctgttttaaattgcatttctatgccatttttagtttaaaatcttgcatggcattaattgttccttgcttttatagttgtattttgtacattttggatttctttatataaggtcatagattcttgagctgttgtggtttttagtgcacttaatattagcttgcttaaggcatacttttaatcaagtagaacaaaaactattatcaccaggatttatacatacagagattgtagtatttagtatatgaaatattttgaatacacatctctgtcagtgtgaaaattcagcggcagtgtgtccatcatattaaaaatatacaagctacagttgtccagatcactgaattggaacttttctcctgcatgtgtatatatgtcaaattgtcagcatgacaaaagtgacagatgttatttttgtatttttaaaaaacaattggttgtatataaagtttttttatttcttttgtgcagatcactttttaaactcacataggtaggtatctttatagttgtagactatggaatgtcagtgtttagccaaacagtatgatggaacacgtgaaagtcaattcagtgatggcaacactgaaggaacagttaccctgctttgcctcgaaagtgtcatcaatttgtaattttaagtattaactccgtaaaagtgtcctgtaggtacgttttatattatataaggacagaccaaaaatcaacctatcaaagcttcaaaaactttggggaaagggtgggattaagtacaagcacatttgggcttacaagtaaatgaactgatttttaataaactgcttttgcccatattaaaatgctggataattactgggaaaccctaaccaagcttcacgattaatgactaaagtaccagattataatgccagaatataatgtgcaggcaatcgtgggatgtctctgaccaaggggtgtctcaaaaataatattactttttacattaaaggaaattttaatgttttttctgggagttgggggctcatggcttttcagagtttggttaatccagtgttgattctagatgatcaaacataatggaccactcctgaatgagaccttaattttgtcctttcaaatttacctgtccttaaatcagtttattaaatctgaattttaaaacatgcctgtttatgacacaatgacacattttgttgcacccaattaagtgttgaaaaatatcctttgcatcatagaacagaaatatataaaaatatatgttgaatgttaacaggtattttcacaggtttgtttcttgatagttactcgaaaggcnaccatctagggaaaggtaaatacaagtgaacaaaataagcaactaaatgagacctaataattggccttcgattttaaatatttgttcttataaaccttgtcaataaaaataaatcataaatcaaaaaaaaaaaaaaaaagggggggccgttttaaagaatccttgggggggccaaattttacccgggcttgcaaggtaaaatttttttccttatagggagccgaattaaaacctacttggggatttttggaaaagaacctttttttgggggggggaaaaaattggaaaaac

SEQ ID NO: 525 - DNA, 218 bp, Homo sapiens
tttcccgctccgccgcgcactgttgtcatggaggaaccaagatggcggctctggcctacaacctgggcaagcgggagatcaaccacagttgtatgatgcataaatacaaaatcagtgaagcaaagaactgccttgtagataaacatattgcatttattggagattccagaattcgtcaattgttttattcttttgtaaaaataattaatccccaattc

SEQ ID NO: 526 - DNA, 218 bp, Homo sapiens; identical to SEQ ID NO: 525

SEQ ID NO: 527 - DNA, 928 bp, Homo sapiens
caagaacgtcccagtgcccttggctcctttcggagtgtgaccccgtgcttgcacgggacacgttacccagctcgggtgagaagggtatcttccgggaacctcgcctttaatagcacaacgagcgcagagtccactggatctgcgagaagaaaccgcgctaactagtttgtccctacggccgcctcgtagtcactgccgcggcgccttgagtctccgggccgccttgccatggctgcccgtggtgtcatcgctccagttggcgagagttttgtcgctacgctgaggtaccttgcagcccctcggccaaacggccagacgccgacgtcgaccagcagagactggtaagaagtttgatagctgtaggtcagggtgttgcagctcttgcatttgcagggtcgctacgcattaacggatctggaaacctctagaaacaagttatcacagaaactgccaaaggaagatttcaaactcctagcttttcatcctactataaagtgaggatttgaccagaaaaatgagtatggcgagaagctgcgtcttattttaggtgtaagcccagtctgctggcaaggctaaggattagaacaagctcataggagcagtcatgattttggaatcaccccagataaagggtggatctcccttacgtagcagccaaaataaatgaagcaaaagactttgctagaaacaacccccccaacattgatgcttaaggaccacactgaaggaaaaaaaaacgaggggacttcaaaaaaaaaaaaaagccctgcaaaatattctaaaacatggtccttcttaattttctatatgggatttgaccacagtcttatcttccgaccattaagctgtataacgaataaaatgttaatagtcttgctttttattatcttttaaagatctccttaaattctaaaaaaaaaaaaaaaaa

SEQ ID NO: 528 - DNA, 826 bp, Homo sapiens
cggacgcgtgggtagaagcacatagtgataggcgaggggaaacttaaatcatcatcctggggcagccgtggtggctccatgcgtgaggctggtgccatgcagtctcctggtgttggcattgtctccaggccttctcctcagttctgcacacagctacaaaacaaaagaacagttgccagcacttggaagaggatgtggatccaaaccaaatggaggacagatactccctctatggacaagatactcatggaagaagtcaagttagaagagcagctgaaggaggctgtggaagaagataagcaagcactggcagatactgagggctcagagcagagcagccaaaaattggtggaggagggaaatatgtatagcattcagggcttctgcaaggactcgttagaggttgcagatgttttggagaaggcaacacagtgtgttccagaagaagaaattaaagacaataaccctcacctgaagaacctctctctatgggaccatctagttgcaggaaaagaaggtcaagactcccagtcattctacattatgtctatggaaaaactgtcttccacaaaactggtccctgctcccccaaaaattggggaccgctgcactcaacacagagagaaaaacaaaaagctcaagtctttacctctcagccctcagccaagatgtctcaccccactctctctgatgcaacaagaagcccctggagaacgtttcagtcccattttgtacttctgtcatgtgctcatcacagtctggtaagtgctggcatacgattcctaaattagtccattttgcattgctgtaaggaaatacctcaggc

SEQ ID NO: 529 - DNA, 279 bp, Homo sapiens
aaagggaagcttagatttattgagcgcctactgtgtgccaggcagtgtgcaaggcgctttacatacattatcgcattaaatcctcacaacaaccctgcgaggtaggtgtttataaacccccatttgacagatgaggaaactgaggctcagggaggtgaagtgatgtggccaagttcacatggctaataaatggcagacagaggaggtgagccctccttctgctttgttggttgttgctggacctatgcctcttctcccaagaacccctctgtcatctga

SEQ ID NO: 530 - DNA, 927 bp, Homo sapiens
atgttgcagcaggatagtaatgatgacactaaagatgtttcactgtttgatgcggaagaggagacgactaatagaccaagaaaagtcaaaatcagacatccagtagcatcgtttttccacttattctttcgagtcagtgcaatcatcgtctgtcttctctgtgaattgctcagcagcagctttattacctgtatggtaacaattatcttgttgtcatgtgacttttgggcagtgaagaatatcacaggtagactaatggttggcctacgttggtggaatcacgttgatgaagatggaaagagccactgggtgtttgaatctagaaaggagtcctctcaagagaatgaaactgtgtcagaggctgaatcaggaatcttttggttgggacttgttgcctgtccagtgctgtgggtgatacttgccttcagtgcacgcttctccttcagagtaaaaagtggttggcggtggttatcgtgggtgtggtgctacaaggtgccaacctgtatggttacctcaggtgtaaggtacctagtgtcagaattgaatcattggacacccagttgggcatccagaattggagaattggttggtatgagggaaaagcccacacatctggtgtcagaagtgttggaaatagaaacagatcagaatgacacgcatccgtgtttgctccagctgaggctgcaacaaaggaggacgagagaacaactagtggaccagggcatcatgccacaaacatttgcagagccatccctgcaggctactcagatgaagttgaaaagagctcgactagcagatgatctgaatgaaaagattgctcaaagacctggtcctatggagctggtagagaaaaacatccttcctgtggactccagtgttaaagaagcaattataggcaagactctaaaaatttactatttggggtga

SEQ ID NO: 531 - DNA, 2333 bp, Homo sapiens
gaacttgctaatctcttttgtcacattcggattgctcctgctgccccacacacactaacccaaccatgttggggtggactccctgccagcccaactgttgtattttcagttcttccagtgtgaatcagttaatattctcgggaacgaggcgagaggttgatcctatgaggaaatcaaccacagtgaaaaggcttgggccgcttttgttttcacctgcttttgttgaacaaatttgatttcccggagtcagtcattttactgtcaagacatttcttcggcattctgcaacagtttccaacatggccagatccatcagaaactgaagccgtggagaacgctctcggggcctttgccacttcttggagtagaagccgacagagagctgttttggaaacttctccttcacacaccagttgaagactaggctttggaggttttcaaagcagacggtgcttgggatgggcagggagaagtaacattctgcaaatcgccgtcagaggtcctgaggacacagacctacctggcttgcattccccttgctgaatggcgtgtgctgcagctgcccactgagggctcttttccctgggattctggacttcagagtaggacagcaggctgggaagatgctgagttccatcaagtgcgtgttgggtgggcgactctgcggtggggaaaacttttctggtgggtgcgtttcacctccagaaccctccgggaaggctacagccccccagtgtacgagaacacaggggtggacgtcttcatggatcggcatccagatcagcctgggccctctgggacacagcggcaaatgacgctttcagaagcatccggcccctgtcctaccagcaggcagacgtggtgctgatgtgctactctgtggccaaccataactcattcctgaacttgaagtaacaagtggattggtgaaattaggagcaacttgccctgtacccctgtgctggtggtggccaccccagactgaccagcggggagatgggcccccacaaggcctcctgcgtcaatgccctggaaggggaagaaactggcccaggatgtcagaggcaaggggctacctggagtgctcagcccttagccaatcggggagtacagcaggtgtttgagtgcgccgtcccgaaactgccgtcaaccaggccaggagacgaaacagaaggaggctctttctccatcaaatgagtgcaagatcttctaaaccccaagagactttcacacaacacttatgtatgcaccccaaagactaatggggagagggagggccgggaagccaggaaagcttggtgttttctctgggtacaccccaagcgagcgtctccgttttggatacagttattgatgaggcttggccactggatgttttcactaactacactctacaagtgaactccttgcccaggcccagttagaaaatcccttggggaactgtgatgaatattccatctttgattaaaaaagtgaaatagtctccataattttggccgatgaagtgagtttttcaaagaattcccatatttagagacaccaattttatttaactaataacaaaatgtattgcttttgtatatatttagttttcacactttgggaaatcttttcctacatccctcgaaaacataaaactcctctgtgagtgaaatgcttgtacgaaggctctgccatatgtttgtagtgttattattttcacctcaagtagaaaggtctgttgaaaccacttgggctgctggatttaaatgggtaatcaaatttaaaaatgaccataaatgaatctttgcaatttgttttctacttacctgttattcacagttggatataaaatacagttccataagatatcctaatactgcctaatgattttaaagttatcactatatttttctgaaatgataaaacatcattcatttatttactatattgtctttcactcaactccagttatgcactaaatattctcctctcattcaccaagattgattgaaacaccatctttcaggtagagaatcagactgctccaagcaatggcaacagaacttggaacagaagcgagagagtgtcactttcacttctggtagggtggttcccaggcgactgcaggtcttgtgaaagacaggggtctcaaagttctgttaatttcacaaatttgttataaatttgtctaaactgagctgttgtggcaacataatttatgaatcgtaaggtctagttaggcttattggggggatatctacatatatatgtgtatgtaagggaaaaaaggtagaatttacagccttcaaaaaagaaaaatcaaattccaagcacaggaataagaaagctat

SEQ ID NO: 532 - DNA, 891 bp, Homo sapiens
ctaactgggctcgtcggcctgccccagctgcaggcccggtgctacacgggctcgggaacagaacatcgtgggcatgcgcagagcatgcccatccgtggcaggtacgccacagcagacacaaaggtatgggagcttggtgcctccagccacaaaagtggaaggccgtgggcccagagtcccctgtggcaggtccagggcccaggctgtgccctcaggctgtggcaggcagcccccagccataagccggcccagccagtggctctcacactggccagtgggtggcgggtggctctccaggtagaggcccaggccccggaggtggcgcagccggaagttcttgggcttgcttccctgggcactggggcactgcggctgcggggaccccaggcccccctcgtagatgttggggggtgcgtcagggtggccggggcgtccttgggcctggctcactgcatcgtccagacgaactaactccacattcaaccaggttgtgctgaagaggttgtttatgagtcgcaccaaccggccacctctgtccgtttcccggatgatccggaagatgaagcttccgtgcgccgtccaagggtccattggttgccatagagatcgtcgagcgctgggcctgtgatcgctgaggggcgagcagttgcgaccctgggctcctggggacctgagcgttatgtctttccgcgacctccgcagtaaggcagccccgcgcccctgtgacctgcgggtcttccagagattcagggctcccgcccgccgggtcccctgtgtaggcgatccctgaggcttgcgctgccggaggctcctttcgggcctctgcgcctcagggaccgcctgacccgcggctgcaacccggccgagcgtcccaggcccttcttcggccat

SEQ ID NO: 533 - DNA, 1406 bp, Homo sapiens
atggaggcagctcagtcatcttctacggcctcatctgcatgtatacactgtggtggatgctacgggcgctccctcaaaaagtactcgtttgagtcgatccgtgaggagagcagctacagcgacatccccgacgtcaagaacgacttcgccttcatgctgcacctcattgaccaatacgacccgctctactccaagcgcttcgccgtcttcctgtcggaggtgagtgagaacaagctgcggcagctgaacctcaacaacgagtggacgctggacaagctccggcagcggctcaccaagaacgcgcaggacaagctggagctgcacctgttcatgctcagtggcatccctgacactgtgtttgacctggtggagctggaggtcctcaagctggagctgatccccgacgtgaccatcccgcccagcattgcccagctcacgggcctcaaggagctgtggctctaccacacagcggccaagattgaagcgcccgcgctggccttcctgcgcgagaacctgcgggcgctgcacatcaagttcaccgacatcaaggagatcccgctgtggatctatagcctgaagacactggaggagctgcacctgacgggcaacctgagcgcggagaacaaccgctacatcgtcatcgacgggctgcgggagctcaaacgcctcaaggtgctgcggctcaagagcaacctaagcaagctgccacaggtggtcacagatgtgggcgtgcacctgcagaagctgtccatcaacaatgagggcaccaagctcatcctgtggtacaaccacatcgcctacatccccatccagatcggcaacctcaccaacctggagcgcctctacctgaaccgcaacaagatcgagaagatccccacccagctcttctactgccgcaagctgcgctacctggacctcagccacaacaacctgaccttcctccctgccgacatcggcctcctgcagaacctccagaacctagccatcacggccaaccggatcgagacgctccctccggagctcttccagtgccggaagctgcgggccctgcacctgggcaacaacgtgctgcagtcactgccctccagggtgggcgagctgaccaacctgacgcagatcgagctgcggggcaaccggctggagtgcctgcctgtggagctgggcgagtgcccactgctcaagcgcagcggcttggtggtggaggaggacctgttcaacacactgccacccgaggtgaaggagcggctgtggagggctgacaaggagcaggcctgagcgaggccggcccagcacagcaagcagcaggaccgctgcccagtcctcaggcccggaggggcaggcctagcttctcccagaactcccggacagccaggacagccctcttggctgggcaggagcctggggca

SEQ ID NO: 534 - DNA, 3300 bp, Homo sapiens
agtcctctcggcctctgtgcgctcagttgtttacctaggcgtccgggggaggcacactcgcgggactcgcgggactcggccccggcctcccagctcgcccaggacacgacgctggttctgcgggctctcggagcccagcgcgaatcccccgggctaattcccaagaaccgagaggcagcactgcctggaggctgcccccgcctccgcgcccccgtcctcactttctgaggctgttagcagagagtcccgcgggccggggagaagcgggacgcgggggatggcctcgcagcgccctgtgagcgtcggcagtagtcaggcagccagggctccttgggcgatcgccctgggtagaggagaggagtttccggggctcgggtccgggtcgccttccaggggaacgagcgcggaagcaagtgggcggcgagaggcggagcaagagacgctggagggcgtggacgcagcgggctttggaaaggccccaagttaatgaggcgtgcgccggctgccgagcgcctcttggagctgggctttcccccgcggtgcgggcgccaggagccgccttttccgctgggtgtcactcgggggtggggaagatggcccattcaaaagcgccgcgagggggcccggccagtgcccttcagtgagcgctcgcaagaggacggcagaggcccggcagctcggagctccgggaccttgtggcgcatcaggacgcggctgtccctctgccgggacccagagccgccgccgccgctctgcctcctgcgtgttagcctcctctgcgcgctccgggcaggcggccgtgggagccgctggggcgaggacggcgcgaggctgctgctgctgcccccggcccgcgcggctggaaacggagaggccgagccaagcggcggcccctcttatgctgggaggatgctggagagtagcggctgcaaagcgctgaaggagggcgtgctggagaagcgcagcgacgggttgttgcagctctggaagaaaaagtgttgcatcctcaccgaggaagggctgctgcttatcccgcccaagcagcatgcaacaccagcagcagcagcaacagcagcagcagcagcagcaacaacagcccgggcaggggccggcccgagccgtcccaacccagtggccccgcttgtcgccagcctcgagccgccggtcaagctcaaggtaactgctcttctccaacatgaagaccgtggactgtgtggagcgcaagggcaagtacattgtacttcactgtggtgatggcagagggcaaggagatcgactttcggtgcccgcaagaccagggctggaacgccgagatcacgctgcagatggtgcagtacaagaatcgtcaggccatcctggcggtcaaatccacgcggcagaagcagcagcacctggtccagcagcagcccccctcgcagccgcagccgcagccgcagctccagccccaaccccagcctcagcctcagccgcaaccccagccccaatcacaaccccagcctcagccccaacccaagcctcagccccagcagctccacccgtatccgcatccacatccacatccacactctcatcctcactcgcacccacaccctcacccgcacccgcatccgcaccaaataccgcacccacacccacagccgcactcgcagccgcacgggcaccggcttctccgcagcaccctccaactctgcctgaaaggggcagctcccgggcaagacaaggttttgaggacttgaggaagtgggacgagcacatttctattgtcttcacttggatcaaaagcaaaacagtctctccgccccgcaccagatcaagtagtttggacatcaccctactgaacaacttggcgattcttcttagttttctgcatacttttcatcacgatgcaggaaacgatttcgagtcaagaagacttttatttatgaacctttgaaaggatcgtcttgtatggtgaattttctaggagcgatgatgtactgtaattttattttaatgtattttgatttatgattatttattagtttttttttaaatgcttggttctaagacatttctgaatgtagaccattttccaaaaaggaaactttattttcgaaaaacctaatccgtagtaattcctaatcttggagaataaaaaagggcggtggaggggaaaacattaagaatttattcattatttctcgagtactttcagaaagtctgacactttcattgttgtgccagctggttgaaattaaaactcctgatattactttttttgaggatttttatttttgtttttgcttaaacatatagtttgtctagaagtttaaaaagctaaaagttaaaaatggtgtaattatgaaaatctaacactcaagatagtttctaaaaggaaatcagtagttaaggatacctgatttcaaaatatttaaagcataaccctaactgatggtaggatgattgtatcctgaatatgtggtagggccacatctattgtaggaaaaccttgcttttatcatctgtgtgtaaagggcttaataaggagaagaggccttttgactgatttgtgagtataaatgcatttgctgtttcatttcaaaaatgttgtggaggaaaagggtacatttaacttgtataagagaatatttgtactcctgtccaggctgcaggacctttcttcgagagctttgcacacttgacttgaaccacattttctgatccctttactttgttttagaagcacactgaaaaatctccgttgtttaaagtacaatttgtaaatatttcaaaggtctaggagtcataacttttgttttcatactgaaaatgatgttgatcagagaaaccaactgttttgcttttcattgctctgtgagaaatttgaggattctgttttgctgttaggtaagctaaactcagaaattgaaaaggaaaagactggataaacacaggattttcagtaagaaaacaaccccagtcttgtcttagaagccacttgttgaggagtctgttgggggaaaaaagaggatatgcttttaaagggtagaacaaaccttcctctgtgttaaatcaaaaggatggttcaaatccaccaggacagatgctacttgggtttaaatggagccatagatgatacaaagtcctcttggggctgaaaatcacttcctatttgcatggctttactaactggtttctgttttccattatctttttcacagaaagtcttggtcagtatttttccagcatttaaattgaaacggtcagtattagaccactgctaggttatgtagtcaagaaataaaaatagaattacatgct

SEQ ID NO: 535 - DNA, 422 bp, Homo sapiens
caagatgacggagccgggcgcctctcccgaggacctttgggtcaaggtggagtatgcctacagcgacaacagcctggaccccgaccctgcgggagattgtgattggcgtcctgcaccaattgaaaaaccagctttactgaccggttcttggaaacctggagaacagccaacaagaggcccttgaatctctacgtggccactgaactgctgggcccgggagactggactacaacacctcacactggtcagctggtttctacttggtgtttggtttttcccagccccattttatcttcagcggagccgcggtgtttgttttgtgaaagcttctgattaatttattatattgacgataaaactcaaacctacccagccttccccccactccatggaagtccttgggatgggcgtctgctctggac

SEQ ID NO: 536 - DNA, 422 bp, Homo sapiens; identical to SEQ ID NO: 535

SEQ ID NO: 537 - DNA, 422 bp, Homo sapiens; identical to SEQ ID NO: 535

SEQ ID NO: 538 - DNA, 422 bp, Homo sapiens; identical to SEQ ID NO: 535

SEQ ID NO: 539 - DNA, 1734 bp, Homo sapiens
ccgcgcgtcgtgcccgaccagagaagcaagttcgagaacgaggagttttttaggaagctgagccgcgagtgtgagattaagtacacgggcttcagggaccggccccacgaggaacgccaggcacgcttccagaacgcctgccgcgacggccgctcggaaatcgcttttgtggccacaggaaccaatctgtctctccaattttttccggccagctggcagggagaacagcgacaaacacctagccgagagtatgtcgacttagaaagagaagcaggcaaggtatatttgaaggctcccatgattctgaatggagtctgtgttatctggaaaggctggattgatctccaaagactggatggtatgggctgtctggagtttgatgaggagcgagcccagcaggaggatgcattagcacaacaggcctttgaagaggctcggagaaggacacgcgaatttgaagatagagacaggtctcatcgggaggaaatggaggtccatgagctggagaagtccaagcgggccctggagacccagatggaggagatgaagacgcagctggaagagctggaggacgagctgcaagcctcggaggacgccaaactgcggctggaagtcaacatgcaggcgctcaagggccagttcgaaagggatctccaagcccgggacgagcagaatgaggagaagaggaggcaactgcagagacagcttcacgagtatgagacggaactggaagacgagcgaaacgaacgtgccctggcagctgcagcaaagaagaagctggaaggggacctgaaagacctggagcttcaggccgactctgccatcaaggggagggaggaagccatcaagcagctacgcaaactgcaggctcagatgaaggactttcaaagagagctggaagatgcccgtgcctccagagatgagatctttgccacagccaaagagaatgagaagaaagccaagagcttggaagcagacctcatgcagctacaagaggacctcgccgccgctgagagggctcgcaaacaagcggacctcgagaaggaggaactggcagaggagctggccagtagcctgtcgggaaggaacgcactccaggacgagaagcgccgcctggaggcccggatcgcccagctggaggaggagctggaggaggagcagggcaacatggaggccatgagcgaccgggtccgcaaagccacacagcaggccgagcagctcagcaacgagctggccacagagcgcagcacggcccagaagaatgagagtgcccggcagcagctcgagcggcagaacaaggagctccggagcaagctccacgagatggagggggccgtcaagtccaagttcaagtccaccatcgcggcgctggaggccaagattgcacagctggaggagcaggtcgagcaggaggccagagagaaacaggcagccaccaagtcgctgaagcagaaagacaagaagctgaaggaaatcttgctgcaggtggaggacgagcgcaagatggccgagcagtacaaggagcaggcagagaaaggcaatgccagggtcaagcagctcaagaggcagctggaggaggcagaggaggagtcccagcgcatcaacgccaaccgcaggaagctgcagcgggagctggatgaggccacggagagcaacgaggccatgggccgtgaggtgaacgcactcaagagcaagctcagagggccccccccacaggaaacttcgcagtgatgc

SEQ ID NO: 540 - DNA, 422 bp, Homo sapiens
aatgaagaaaaacttaactttattgagcataggaatagacgggctttcaaattattttttgctttatggttattacttttataaaccatctgatccacggcaaaactacattgcttaaggtggtaataaggggtcagatgctctacagcaaccttcaagcacaggcaccgatttgcattttatgcaaaacttcaggttttactcaatttttacactggtggaagctgatgtcagtaacttaaaaggcaagcaaatacttttccaattcttagctgaacaaaaaatacacacaatgtagcgtttttattgggcaagacttgctttttatatttcacgtgagaatgcaatataacccttccttgaacaaaatgaccagggtactaataaaaccatctttgcaggagtgtttaataagcatattt

SEQ ID NO: 541 - DNA, 571 bp, Homo sapiens
gcggtggaattccccgtgtattcctgtacgagctgctccccgagtcccctttcttcctggagtgcaacagcttcacgtcgcctgacccccacaagggcctcgtcctcctgcctaagacggagtgcgacgtgcgggaagtggagctgatgcggtgcctgcggctgcgtcagtcctccctggagcctgtggccttccggctgccccgagtccggaaagagttcttccaggatgacgtgttcccagacacggctgtgatctgggagcctgtgctcagtgccgaggcctggctgcaaggcgctaatgggcagccctggcttctcagcctgcagcctcctgacatgagcccaggtgcaccgagggactgggtgtggggaggaagcgggatgggggttggagaaagggacagaaggcccaggttgaagttccattcctgttggcacgcagaatcctctggcctttgggagggtggagtggctgtgtcaatcagtctctgagccagtggagggcagggctcgtggtctgtgttttcatcacaggtcccccccccccccaaaaaaaaaaaaaaaaaaaa

SEQ ID NO: 542 - DNA, 822 bp, Homo sapiens
atggttcctgatgaaaggtacatcactcaggaaggccacaagctggaaacaggggccccgcggccaccagccaccgtcaccaacgcggtgtcctggcggtccgaaggcatcaagtatcggaagaatgaggtgttcttggacgtcatcgagtctgtcaacctcttgcagcttgaggttacgttctttgctggagaaaagcgttttgaaacagaaacgcccacggtgtccctgacgctgagttgtggaaaccccaggctcatcgtcgctagagcaaccccacctcccttcctggagcagctcagccaatcaaagagaagcgaggcggccattcgggcggaaatagtgtttgcaaacaggaagtgtggcactccagctaccgaagcactggagagtgtcatggaggcctacgagcaggtccaaaagggacccctgaagcttgaaaggcttcgcagagctgggagtgaccaagcggaaggaagaaaaaggaaggacaaagacaaagcgaaactcctggaagcaatgggaacggagcaaaaagaacggaggaggagaagcggcgcggcctggacaagcggaccccggcccaggcggccttcgagaaaatgcaggagaagcgggtgctcatctgccggaactaccgtggcgacgtggacatgtcagaggtggagcacttcatgcccatcctgatggagaaggaggaggaggggatgctgtcgcccatcctggcccacgggggggtccgtttcatgtggatcaaacacaacaacctgtatcgtatccctttgctgggggtgctcccaggggactcctgtgtgggtgttg

SEQ ID NO: 543 - DNA, 1430 bp, Homo sapiens
gacgccagcgcctgcagaggctgagcagggaaaaagccagtgccccagcggaagcacagctcagagctggtctgccatggacatcctggtcccactcctgcagctgctggtgctgcttcttaccctgcccctgcacctcatggctctgctgggctgctggcagcccctgtgcaaaagctacttcccctacctgatggccgtgctgactcccaagagcaaccgcaagatggagagcaagaaacgggagctcttcagccagataaaggggcttacaggagcctccggggaaagtggccctactggagctgggctgcggaaccggaggcaactttcagttctacccaccgggctgcagggtcacctgcctagacccaaatccccactttgagaagttcctgacaaagagcatggctgagaacaggcacctccaatatgagcggtttgtggtggctcctggagaggacatgagacagctggctgatggctccatggatgtggtggtctgcactctggtgctgtgctctgtgcagagcccaaggaaggtcctgcaggaggtccggagagtactgagaccgggaggtgtgctctttttctgggagcatgtggcagaaccatatggaagctgggccttcatgtggcagcaagttttcgagcccacctggaaacacattggggaaggctgctgcctcacccaaaagacctggaaagatcttgagaaacgcccagttctccgaaaaccaaagggaacgacaggccccttccctgaaggggcctaccctgtgggcccccccatcattggaaaggggctgcaaaaaattctttcccagggatggagagcaagaaacgggagctcttcagccagataaaggggcttacaggagcctccgggaaagtggccctactggagctgggctgcggaaccggagccaactttcagttctacccaccgggctgcagggtcacctgcctagacccaaatccccactttgagaagttcctgacaaagagcatggctgagaacaggcacctccaatatgagcggtttgtggtggctcctggagaggacatgagacagctggctgatggctccatggatgtggtggtctgcactctggtgctgtgctctgtgcagagcccaaggaaggtcctgcaggaggtccggagagtactgagaccggtaggtgtgctctttttctgggagcatgtggcagaaccatatggaagctgggccttcatgtggcagcaagttttcgagcccacctggaaacacattggggaaggctgctgcctcacccaaaagacctggaaagatcttgagaaacgcccagttctccgaaaaccaaagggaacgacaggccccttccctgaaggggcctaccctgtgggcccccccatcattggaaaggggctgcaaaaaattctttcccagg

SEQ ID NO: 544 - DNA, 204 bp, Homo sapiens
gcagctgccagacccggccatcgaggaccagggtggggagtacgtgcagcccatgctgagcaagtacgcggctgtgtgcgtgcgctgccctggctacggcaccagagggccggcaaagaagccaagtgcccatagccagagccaggcttcttcctcgcctgagtggattccagagcttctgccctgtccagacgcagctgcagg

SEQ ID NO: 545 - DNA, 386 bp, Homo sapiens
  misc_feature (1)...(386): n = a,t,c or g
gcagaatcagactatcaggaaaggagctggccatggccatagccagtcaagatctctgagcaacttaaagacattggtgtcattatatgaagcttgcatttaatacatttatacataatacatttgtacatttaattcataacgtctcttggtcacagatgccttatatataaaataagttgccagatctctaagattgcctagaacacctttgtatctcatttgatgtgatacccagaagagatcattggnnnnnnnnnnnnnnnnnnnnnnnnncaagaagatccttcgtgatcaccatgctgttctcatggtaagaactggagttatgtttttaaatttggaaatatgacattttatgtagcactttataaaaagtgaaagcg

SEQ ID NO: 546 - DNA, 1827 bp, Homo sapiens
ttagtccacaggtcgcttttccccatatttctttgtaaactcttcagcattcttacagaattttttacggtccttagagtattcttcagctaggtcagcccgaagcgggtgctcaggctgggggtcattcaccagtgctatgagggactggattacagggtggagcgccgtgtcctccaccgacgtcaatgacgtgctgaggttcacccattcattcacctgcgaatgctgcaccgactggggaccgggctcctcactgttcttggaaaagttcagcttgatcagggacctcccgtccagcttctctccattgctggggttggtcccgtacttcttaagccatggaacaatgttcagtaagtcaaagacgatgccatcgggagtgcagactggcttcttgccaccataaaagtgagtgtattcagcacaggtaatgtacattttgtccttttggtgctgtcgcttccccatggcggagcggcggcggcgaaattgagacctgttgctgttgggcccggagttggccatgctgaggatgccgcggcccgtgtgcgagaggttgggccggaactcgtctttgaagggcttcccccagtatgactccccacccgtgcctgtgcctgtggggtcgcccccttggatcacaaagttccggatggatctgtggaagatggtgccatcgtaataatgcttcttgcaaagcctgatgaagttttcgcaggtttttggtgtctgtgcgcaggccatgctgccaacgcggccccctaggaaggacacagggcactgctgcgggtcccgcctagtgacaggctgaatttccagtggcagccctatatttaagacatggctgtcagatgacccagagatgaccttggggcatggggagtggctggcctccacacccaccaggtcgcagtgcagctccaggttgaggtcgcccttgttggtgtgcagccgcacgtagcccttcttcttcacaaactggtagcgcagcacatcctcgtcgatggcagctgcttcatgtgtggtctccgggaccatcgcggtggaggtgaaggaagcgctgaccttccctgtggaatagtgggcagcattcagcttgtccactttcttcttctccggggccttcatggtggctgccagaatctcgtcccctttgaactccttgtagagctcctgcagggtctctcgggtctcggcatttgtatttttcagataataagacgggtcctgtttggccttctcttcatctgggtctattattttcatgttattcttcacatgatagaagttagagacattgaacttgtccaaattggtggggtcctggagggtgatgatgtcctgccgggagaagggctcgtcggtcagcaggtcccggaagttcttggccttgatatttagctgttccactgcctcataggcgtagacgttgccggtcgtcctcacagccacgatgtgggtgttgttggtgaacacggtaaacagcactgggcagtggtacttccctgcttcacacgcatgttctctctgtaacccaccactttgtctgattggttggcaggttacgtttttctctcgtcccagctgtgtggacagtgccacacgccctcctggacaacgacggctcttgcgtgcattttccagtgttgcttttgtcagagaggccagcagagccacggttcttccagaaccagccctgagctgagtgaggagtgcccaggagagatggtgaaaatgacaaagtccaaaactttccaagcgtatctgccgaactgtcaccgaacgtacagctgtatccactgcagagcacacctggccaatcat

SEQ ID NO: 547 - DNA, 665 bp, Homo sapiens
  misc_feature (1)...(665): n = a,t,c or g
gttgtaacactccaatacaacagctggacagaatgatggaattcacgtcaatagaaggcggtgcaaaacactcagcaactcaacacctattcagctgatcttctgcaatatggactcgagcataaggggaagtctagcaaggttatgtaagggcctgcaggcatgctgttacatgttcaattgggctcctcaggtctaggtgtactttgatactgtatactcacaccttgatatcagatgcattctgtctttgttaatttctggcataagatttagcactacccactgctcctgatgcctggtttaaattgacagatgtagaacgtttttgtaaaccagatattgctgctgcttctgtagactctgagcacgtaaatcctgtgctatttaaccaaagtgccaccgcatggagaattggggcccaggaattccgatagttaagtcttagctgtatcaatagtttcaggggtataaaatggctccaccatctggaggaagctgactagaaaattcggctggtaaagtcaagagtgcataatcttttaatgctgctaaccacaggcgactgagtgttggtagttcaggttgtaccagtgttattaaactatctggtgacagttcatcgatgcgnacgcgtggacgcacgcgtgggcgtacgcgtgggt

SEQ ID NO: 548 - DNA, 1169 bp, Homo sapiens
  misc_feature (1)...(1169): n = a,t,c or g
gcacgaggggatgcaagtgaatttagtaaaaatccccatattgggagttttgttggaaatcaagtaactattagaaaagctgatggctccctggttcacatcagcataacaccatatcctgctattctccatgaatatgtaagcagttcaaaatgggaagatgctgtgagactttgtcgctttgttaaggagcaaaccatgtgggcttgtctagctgctatggcagctgctaatcgagatatgactactgcagaaatagcctatgcagcaattggcgaaattgataaggttcagtacatcaattctataaaaaatcttccatctaaagaatcaaaaatggcccacatactactgcttagtgggaacatacaggaggctgaaatagtacttcttcaggctggcctttgttatcaagcaatccagatcaatattaatctcataccactgggaaagggcactggaattggctgtccaacacaaaacacatgttgatacagttcttgcttaccggcaaaagtttttggagacatttggtttgcaggaaactaataaacgatacttgcattatgccaaaggtctcccaatatattgggagaaaagcaaagccaccattgagatggagattacacaagaaagagagcatttcttgcgcagccaatccagcaagagtataggtttaaagccctaaatgccatgcgtatctttaaaaaattttatcttttgaaacacgttctgattaaccaagggtaagcatgttttggttgctaaagaaaaaagcataatctttaaccgagtataagtacttgctgtgtatttagtgtaaaagtacatgcagaaagatgaaacacaaagtaattgatgtatttccatcttcttatattttttagtccaataattaggcaaaatattactatggtacttaaggggatacctgtgtaggtgttcggnttatatgtcagttttttgcccattacttcatccctaaatcttcagcatgaacaaatattaatgtcgataataaaacattgggactctttggaaatgtatgttaccattaatttgctatttggacctctaaatttgtaaaaatgcctcccaaaagtttatttatagggaccaaaaatacatgaggatggatttgtcccaatggataaaaatggcactattta

SEQ ID NO: 549 - DNA, 403 bp, Homo sapiens
cgaaggggacgccgggaacagggccagctgaggggcccacggacatagggcacccacaataggcgtgtgtctgctgtgtgtttgtgttcggccgtcctgcttctctgcttccacacgtacacatgcccctgtgttactttggttcatcttctgtactctgtcagttttctgctggtcagaacatctgtgactgtgacagagctgtccaggattgcagtggataggaatttcttcacatggctcctggagaagtgaccatcacagttcgcctcatccgttcctttgaacatcgcaatttcaaacctgtagtgtatcacggagtgaatttggaccaaactgtaaaggaatttatcgtatttctaaagcaagatgcactaaagattattcatcaagcacataaatc

SEQ ID NO: 550 - DNA, 2343 bp, Homo sapiens
gagcatgacctgcattacgccaagcttggcacgagggcaacgggcggaggcggccgaggaccgtctgggcacaatgtttttttggacgagggcggcacgcccctgctggccgagagcctggtctaccagatcttcctgagcctgggcctggccgatttgctggccgccgggctggtgtgccgccaatggcaggccgtgtcgcgggacgagttcctgtggagggagcagttctaccgctactaccaggtggcccgcgacgtgccccgacacccagcggccatgtcctggtacgaggagttccagcggctgtatgacacggtgccctgcgtggaggtgcagacgctgagggaacacacagaccaggtcctgcacctcagcttctcccattccgggtaccagttcgcgtcctgctccaaggactgcactgtgaacatctggagcaacgacctgaccatctcgctgctgcacagcgcggacatgcggccctacaactggagctacacccagttctcccagttcaacaaggacgactcgctactgctggcctcgggggtgttcctggggccgcacaactcctcatccggcgagattgctgtcatcagcctagactccttcgcgctgctgtcccgcgtgcggaacaagccctatgacgtgtttggctgttggctcaccgagaccagcctcatctcggggaacctgcaccgcatcggagatatcacctcctgctcggtgctgtggctcaacaatgccttccaggatgtggagtcagagaacgtcaacgtggtgaagcggctgttcaagatccagaacctcaatgccagcaccgtccgcacggtgatggtggccgactgcagccgcttcgacagccctgacctgctgctggaagccggtgacccggccacgtccccctgccgcatctttgacctgggcagcgacaacgaggaggtggtggctgtgctcgccccccgcccacgccaaggagggcttgcggcactttctggaccgcgtgctggaggggcgggcgcagccacagctgtcggagcgcatgctagagaccaaggtggccgagctgctggcccagggccacaccaagccacccgagcgcagtgccacaggcgccaagagcaagtacctcatcttcaccactggctgcctcacctactccccacaccagatcggcatcaagcagatcctgccacaccagatgaccacggcagggcccgtgcttgggtgagggccggggctccgattgccttcttcgaccgccgcttggaccaccgtcatagacatacacgggacacatcatcgggcatgggcctgttcgcccgacaacaggtacctgtacgtgaacagccgcgcctggcccaacgggtgcggtggtggcccgaccccatgcagcctgccaccaatcgcggaggagattgaccttgctggtgttcgacctcaatgaccatgcgggaggtgaggcgggctctgcgtgcgcaccgcgcctacacgcccaacgacgagtgcttcttcatcttccttggacgtcagcaagggacttccgtggccagcggggcggaaggaccggcacggctaacatcttgggaccgccactacaacatctggtctggccaggctgcggcacgaggatgtggtcaactcagtggtcttcagtccccaaggagcaaggaggtgctgcttcacggccaagggacacgccacccatcaaaagctgggcgctccccacgcaccatgggcgtccttcagggcacctcgcccacggcctcgcaccttcttctcctggcttgccagccagaggcgctgaggtgtgctgggtgcaactggagccaccgggaccccttgaggacatcgccaggctctgtggctttttcccgagcggggagaggtggagatgcttatagcagttacgcctttaggaaaggggacaaaccaggccccggccacaacgctcacaacacaaaaaccttgtcacggcagctgtgatgcttggcacggggtggccagtgcagatggagcccaaaggccccctcggcctcctgggcaactttggggtacacaaggatactgggggtgccgctcctcactcaaaccccaggctaggggtacaccctgacccagctggcctcggcccgggggcaccttcggctggtcctgtggggccctggacggttggcccagtggtggcaggggctgctcctggctgtggttgctcgcgcccgcggcttgggtgctggccggtcacgctgctgtgggcccgagtagtgttgcatgtccacgcaccacccgttcagggccctgaataaacagttggcaacagcaaaaaaaaaaaaaaaaaaa

SEQ ID NO: 551 - DNA, 405 bp, Homo sapiens
  misc_feature (1)...(405): n = a,t,c or g
ccttcttgtctttctcctttttctttggtttgttctgctggggctgagagagggctgcaantgctcgtgcacggctttgagctgctcctggantcagccagccgctgggtcgctcctcctcagagtcatcagtcgaactgtcactgtccnaggagctatcgctgctgctgctcttctctggtnctgggtgctgctgagagtcgggcacgtccttctttggaggtttcacaggccggctgctctcccgccgctggccagcttggtggtcttgggctccgggggcagcgagggtggctcgtgaatggggtcaatggtggtgggggtggtggtgtctgctttcctcttcactcccttctttgtcttcacaggctgtggggtggccgcgatgatggggtnggtggctct

SEQ ID NO: 552 - DNA, 400 bp, Homo sapiens
aaagtataaagtgttttggaaaaaaaggaaaaaaatctatataaaaatctcttcacatataaaatcctgaagaaggtgcaaggtgagacccagtgcgaggggcgtgctcagatatgcagtgtgtgtgtgtgtgtgtgtgtgtgtgtatccgtgtgtacatgtgtgcacgtgtgtgcgtatgtgtctgtgtgtctgtgtgtgtgtgtgtgaagctcagtggagattcactgtgggggtcagggatgtgcacgctgcatttgcctccagccccaagaaggggggtgcactgagcaggctgtggctctgcactgtgccgcccagctctggaggaacaggcttaagctgatgaagcagcctgtggcccgggtctgatgggatctctgcaacaaccccgtgttgc

SEQ ID NO: 553 - DNA, 450 bp, Homo sapiens
  misc_feature (1)...(450): n = a,t,c or g
ctggtgccgctcactgagaggatgacaagagggccagcttgctttgggagagcactgggaatatctgccgcatcatcacctctggaagaatttcctttgccctgatgaatacaccgctgtctaaattaatccatcgacatcacacttaccccacagtggggctcctgagccatggacaatgatccatccctttgagctttttttggttttaaagtgcgtagtggnnnnnnnnnnnnnnnnnnnnnnnnnnnnnnnnnnnnnnnnnnnnnnnnnnnnnnnnnnnnnnnnnnnnnnnnnnnnnnnnnnnnnnnnnnnnnnnnnnnnnnnnnnnnnnnnnnnnnnnnnnnnnnnnnnnnnnnnnnnnnnnnnnnnnnnnnnnnnnnnnnnnnnnnnnnnnnnnnnnnnnnnnnnnnnnnnnnnnnnnnnnnnnnnnnnnnnntccccgaccga

SEQ ID NO: 554 - DNA, 468 bp, Homo sapiens
  misc_feature (1)...(468): n = a,t,c or g
ttttttacgcctctctcactggtctgggcatnggatgtttctgttgaagccatagcagcactggcttcttggttaagagaagttatggtttccaatatcgacatggcatcattggctacattagcactgggcccaggagtaggaacacctgaggtctgaatgtgtggttgatctttgggtccacaacctgagaaataattcggtcaataccagactccaacattcctgatttgaggacttgttgtctaatgttgtttcttagctggttcttattgagatgcggactccatgtgtgagttgccaagtgatttgcaacaaagttgtcaacacgctgtctcagattctgatacgcaggcttggtgtccacgtcggccaggcagtctctgcggaactggtcgaagagcccctggctcttgaggtggttcacgagttatagatcgcgggcggccgctcgcgatctagaactag

SEQ ID NO: 555 - DNA, 468 bp, Homo sapiens; identical to SEQ ID NO: 554
  misc_feature (1)...(468): n = a,t,c or g

SEQ ID NO: 556 - DNA, 825 bp, Homo sapiens
ttagcaccgagcagcagcgcaggagcgccagaagggcgggagcacacgggcccttccccacagccagcgcctccgcgggtcccacccctcgagggcggggccgaccgctctttccgggtttgcgagcggaagtggacgaatttgaatcctgtgggccgttgaatgtggctgctcgcggtcggcgtgccccgacgtacagcgggccgggaaaagtggcactgaggctctggaacttctgcccagctctccttggtgagtaaatggggaacgggaagacgcagaacgttccagagagagaagcaggaccgtggggtgggagagggtgtcaggaggccggacgtcgcagccggggcctcgcagtgcttttggggacgtctggtgctggggcccggcctggagactaagggaattcggggcactgggggcgtttgctggaccagcgctctcgacggttgcgcacgccagccagctctcagtgttgaggattcggaggcccttgaaggatttgttcaacaatgctgattcctgcacttcagatctcagattctgaatcagtaggtctggaggatggcattgaacagtctgcatatttaactgaaaggttagaaaatactgtgagttttcaaaacactgatttgatctttcatgattatgtagtgtgaacagtcccattatctgtttgcaaactggagacccaggaaagtcccgcagtgtagtttgaatgtctggagccaaacagctgatggtataggttccagtccggatctgaaggccctcctgcgtcaggtagaccccagtgtctcttgtttccttctttgtgttcat

SEQ ID NO: 557 - DNA, 418 bp, Homo sapiens
  misc_feature (1)...(418): n = a,t,c or g
tacgccacgcttggcacgaggcagcagatcgaggtggccaggcagctcatagatgagaaagttggcgggaccaatctcggagcacctggagccttcggacagagtccattcagccagccacctgccccacctcatcaaaatacctttcctccaaggagctccgggtgcttcccaaacatggctgccaaggtgaatgggaacccccacagcacccctgtgagtggtcctccggcctttctgacccagggctggggcagcacctaccaggcgtggcagcagcccacacagcaggtcccaagtcacgccgccagcgctgctcctcaggccagctccccaccggactacacaatggcctgggcagaatattacagacagcaggtcgctttctacggacagacgttagggcaggcgcaggccn

SEQ ID NO: 558 - DNA, 454 bp, Homo sapiens
  misc_feature (1)...(454): n = a,t,c or g
agctccttctctgctcatgaaatgcggctggacttttcaaaggcggcatgatcccttggctcaccagttcttcccgggtccggcgctgctggagtttcaactgtagcacattcttccgctcactaagtggaggcaaattgggattcctgccagggtggaggcctagggtcagctcgggctgcaaggagagctcctgcagttcattggcaacagcttcactctggggactgggtgccgcagataaggacacgagcactggttcatcatcattttcgccggcccctcctccgtccagcccattcacagcaatgacggaagggggcaggcacaccacactggagaaatccactttggctttcgtgatggcaatcgcctcgcgcggctcaaggccgggttccgcggctcgccccactccggctctagccgcccgcgtgtcctctcgacnaagaatccg

SEQ ID NO: 559 - DNA, 1056 bp, Homo sapiens
ggccctactgcaagtagtaacagtaaccccgtcgaacagggttctgcaataggtgaactctctcacatgtatatttcatttattcgacccgaatagttaacaaagtctctggcagcattgcttagcgcatcttttttattggtggaatttcccatcccacattttccaagtccatgcacatcaccttcaggcatgaatctatgcccgttggggctccccactgctctaatttcataggatggggtcatcttccttttgccacaccaggcatacagaaaatttttagcgtcacccatgattcaagtgtcttcttcagatcagccttcgcttcctggtgcccagctcttaggaccgtgtgtgactctggccttctaccgagacaattgagaaacgcacagcaactcgcatggaggaatcggcgaaatggctccgaccgcggcgctagggggcggggccagcgagcgtacgcatgcgcagagcgcgtgccagggcgggggatggcgagggcgcgccaatggagggggcggggctcagcaacctcgcggcgcggaagggtttcgttgctagggagatgggctgagccgggcgggcatcgcgccagacctgctactctggataatccactctcctggataatccactaccctggataatcggctgcccgcttttgcgcatgttagggagttgacggcctgtagcattctgatgcagcaaaatatttcgcagggtctgtcatagggatctccggtgagaggaggttcccttcgaaggcagaactggaaaccttgctgctaacttggtagggttgttgagataattacatgagatggcatatgaagggcggcttagttcaatacctggcatgtagtaggtgttcagtgggcgtagttaccggattgattcagatagtctgaacgccagtgtctcttgaaagaaataaactggccgggcgtggtgactgtaatcccagcactttgggaggccgaggtgggcgaatcacttggggtcaggagtttgagaccagcctggccagcgtggtgaaaccccgtttctact

SEQ ID NO: 560 - DNA, 4444 bp, Homo sapiens
acatcatacgccaagcttggcacgaggcctcgtgccaagcttggcacgaggatggagtcacaaaggtacacgtcttagacagagaaatcaaagttaacatctttgatatggctggacatcccttcttctatgaggttcgaaatgagttttacaaggacacacagggtgtgattactggtctatgatgttgggcagaaagactcctttgacgcccttgatgcgtggctggcagaaatgaagcaagagcttgggacctcatgggaaacatgggaaaatattatatttgtagtttgtgccaacaagattgattgtaccaaacatcgctgtgtaggatggaaagtggaaggacgtctttggggctggaagcaaaagggttcctgttacttttgaaactttcaggcacaaactgggaggagggctttattgaggtgtttccagaccttttatatatccatagttgatttatgtgaaaatggcgggaaacgccctaccaccaatagcagtgctagtttcaccaaagaacaagcagatgccattcgcagaattcgaaatagtaaagacagttgggacatgctgggagtcaaacctggggcctcaagggatgaagtcaataaagcgtatcggaaacttgctgtgcttcttcaccctgacaaatgtgtagcacctggcagtgaagatgccttcaaagcagttgtgaatgctcggacagccctcctgaaaaacatcaagtagaaagtacagaaaaaagccacatgtgggactcaaatgcaaacagactttccctagaggtgaaataaccaacggggaggttttcttcccaaaaatctcactgctcttttcattcatgtgttggcatttgtatatcagtaattcaggtacccatttcatagacattttactgagaaatgacctgcatttgtatgaagtgaactgagcgtcacaccctgtacttcatttcatatttctagataattctgaatttttttctcattcgtcagctctgtaattatagtatcacttagacatttcacttggggaaatccacaaggttcctggagggagggaagagaggacaaaaggaccctttcactttttcttttttacggaattcatcatcagagaagaaaataacaaaaatggaagcaaacaacatcagaacccctgtaagtttggtgtgaccttacagacaagttgctgcttttacaatgagttccttaggtggtattttaacccatcgatctaataatgatgaactcctgggccaacccctttgggaagttttgtaaaaaatgaaggtgaataacagttcctgaaattgagcaatccccttttatgaatattcactctgttccctcttctgcagcccacccagtgggagagacaagcccagtccctaagagaaaaggtggtggcagccacaaattctaggtacactggctgctgccctatcctgtcccctggatctgaggcctttcccttgccatagaaatggttgctggtagcagtagagagcactgtgcacctgggaatgaggaatcaggccccaagacagaagtacttggaggagccagctgcagtagtatccgcctgtagtcccagctactcaggaggctgagacaggaggattgcttaagcccaggagctcaagtcccacctgggcaacatagtaagatcttgtctcttaaagaaaaaaaaaaaaggtacttagaggtcgcacttaaagattatgcacatcagcagaggaaaggccagccaagcttggggcaagcttgatgcagtaggagagactccttatgaggcttagcccttgtcttactgccagcctttgccacaggcaggtgagaaaggcagggccactcctcagcaaagttggcctcttctacacttcctcaccagtgttgtttcttccttttttcccctcttccccttcccgtcttgtgttttttctgaaccccacatctgccatcatttctctcctctagagtccctggcttctggccactgcctcctccctcttctaagccttggcctgaatctggttgatcagaggcaagtgtggatcctttgggtggcagtcaggggagatctcagggcctctgttgggaggaatctctgtaattcctgcttgggctccaaatttctgaagagtaatatttttaaactatagcttacaaaatacattctctgaccacagtctcctccttgatatacaagggatggatgaagttcatgtattaggactggcactccttacggtgcttatagaactagtctcaccacttgactcattacgtcgtcattcttgttacatcactcatacttttagctgcaaccacactaattcacatttttatatactttcaattagctgtactaattggggcttgaaagtatataaaatcttcctgtcctgtgaattttaaaaagctatcccatatcgattgccaaagagcatctaccttacctcctaagaagaaaagccactttcttccaatccaagcccactgcagccttgtggattttccacacagcagcttttcactgtatgcctgtacttgggctgcactgagcttgtcttcaggaaaccagagcgttgctttatcatcgcacttttcatcttggtaatatcaaaacaactttttaaatgaactgattgatatatgttatttcttgcgaggttttcctctggcctttaactggcttctgaggctacagaactccaacccagagttcttcgggacctaaattttgcttaaggaaggcctttatcatgctgaaagcactcagacatgtctgtcctcacagcagaatgtagaagtcatatgaatgagggatcgtgcacggtagcgtcagcccgaattgacacgacaactctgaatgtgtggcccactatgaaagctggtgccagttttcatcactgttattaaatactagattgggaacctcattcagccgtattgcacagatgagcaattacagcagagaaaattcattagtgctcccactcatatccttatgtgtgagttggtgaaatttagcctgagcttgattcttaggtcttgagactcagtttccaacaccttcattattaatgttaagaatggccatataccacttcatttacgtaaaaggaataaaataagcaagttaagcttcagggtcctagaatttttctgatttctataatccttcagcagaatattaagaaataaagcatgatctgcaatggaaaggtttttttggcactaacttcatgcagaatttcacagacatctatgcattaatttaaattcttggtgcaaatgtgtgctttgtagttcaaccttattaaaaattcttcagccagttaggatttcaaaatacattagtgagagtaacagctagcagaataattacaatggctaaaacgtttttatagagaatcttgtttttcaaaaaagaataaaaagtttgaatagctattattaaagaaaagccatgtcttcaacatctgagtcaccaagaagtaacactttttaaacttgttagaaatccctggaggcatttccaaattccatcttctaacctaccttaggcacttttaaaatacagcctccttcgggtccctctggttcccccttcaggcctccttttggaaatggatatctcagctgtccaatatttctttggacttccagccattgttattttatttctctatatcaatgtgtccttagttttcttagcctgttaatttaaaaatcccagacttgggggtcattgtgttgcttacccaagagaaaaatgttacagttttatagattgcacatcattctttaaggcatacttttacctcaggaaacttactctagtatgttctcatatattgaattctcaactaagtaactatttctttatacctataaactagtacctaattcactgttagttaaatgagctatagataaggcagctaaattttctgaaagatagccagagtaagtaagcagccactgcaagctctgaatcagttttttaaaaaaaaagaaaaaaaaaaaaaaggagctgtgccccattgaacaatgacaacatcacaaggggaagggagggattttgccaaaagttagaaaggtggagctgctaggccatgtgcttgttgcctttgacagtgacagtgcgcgtcttacaactaattccactaggcatggtaatgtcaccttctttgccactgtaccctatcaagcttactctgaatcaaagtgttttgtagaacttttgaaaatgaacattagcttgcctatatatgctaaccactttccattgcaagcttctctattgactctcggtctgttctttatattactttcattatcctctttgtatctctagttcactatctcttgtatatatatatattcatactcctatatttcttttctttcattttcatctattatgcttctct

SEQ ID NO: 561 - DNA, 721 bp, Homo sapiens
cactgtttgtcaacacacacaatacaaggaaagcagggagtctggggctttttgcaggcgggcctggggtctcagtggaggggacaaaggcaagcaaaagcccatgtccaggagccctgggttgtccccacaggcctcgcctcaaaagagcctcctttggggtgagcagccttgtattggccacaggtgcactaaattgactgtgaatcccaaacctccccagaccagccaggccgcctgcccccacccagaaccttccggtttgccctgtatggaaagccactctcagaaatccctctttcctgagtcagcaatcgtggcaaggggacatgtgttccaacagcggctggggagtggacctctctgtcccttgcccaccttaagccccaaatccagaccccctctgacatcactggcattgcacctgggtgtgcccccctccccacgctatggacccagataggaggggttaggcatgggggaggcacagaatgctggagagatgcgtcctggtgaaccgtggggcaagccctcccaaggacccccaacagaactggccttaggttttgtcagccccactccctttccttcccctctgcctcccacccactctgggggtccacatcaagatagctgggcccagtgtggaagcccaacgtgtctgttctagcagaaaggacacaagcctggtgttctggagacctcggctcaagtctttgcc

SEQ ID NO: 562 - DNA, 518 bp, Homo sapiens
  misc_feature (1)...(518): n = a,t,c or g
ntatacccgtaccactccctgacacgcatagagaaggtattgatgtccttatccagctggtccaggaggctaatggactggatgatcatattgtccacccggttcacattaaacttaactttggcacgggaatagctgtgtcccagccccagctgtgctttacaagctgacagatcggtcagacccttcaccagattgtggaagtgcagacgaactcctcgcaggatctcagctatgactcctccagtctggcagttgtaccctaactcctcctgtattgcggcaccaatcttgggatccccaactcccaagagtactttcttctttttggacggcaggtgggtctccaagagcagactgatctcctccacttccttcagcgccagcagcgcgtagccgaccgcgtgctcaaacagcacgtgcaacagcaccatggcgccatctgccgggttcgcggacgcgtgggtcgacccggggttccggcgcagggccctcaagtnttctattnnggggcagcg

SEQ ID NO: 563 - DNA, 367 bp, Homo sapiens
ggcacgaggatggaataaggtttccccaacagaactgcgcttcccaagaatgggaataagaatgggggtgaggccagcatggtgcgggggtgtctagagagagcagaaacctgaggctgtcccaatggcatgccacagggggaacgcctgagccgctttggactccgcacagagaccacaggcactgtcaccttccgcttgcactgtctgcagcagtccaggtgagtgacttggccctctgcctcagggcacctttagccctgaggggtggagacagccgtaaccatgtggctggcctccctgcagggccttcatggaatcgagctcccttcagaaaaggatgcggagtgtgttggacccgctggaa

SEQ ID NO: 564 - DNA, 367 bp, Homo sapiens; identical to SEQ ID NO: 563

SEQ ID NO: 565 - DNA, 496 bp, Homo sapiens
  misc_feature (1)...(496): n = a,t,c or g
gcaactcctcgcacgtggccatctcggcgcctgtctntgcacagcctgttgatgccagcgtggggctggcctggctggccgtgggcagcatgtgcctcttcatcgccggctttgcggtgggctgggggcccatcccctggctcctcatgtcagagatcttccctctgcatgtcaagggcgtggcgacaggcatctgcgtcctcaccaactggctcatggcctttctcgtgaccaaggagttcagcagcctcatgctcctgctgctgctctgaggactcaggaacaccttcgagctttgcagacctgcggtcagccctccatgcgcaagactaaagcagcggaagaggaggtgggcctctaggatctttgtcttctggctggaggtgcttttggaggttgggtgctgggcattcagtcgctcctctcacgcggctgccttatcgggaaggaaatttgtttgccaaataaagactgacacagaaaatcaaaaaaaaaa

SEQ ID NO: 566 - DNA, 496 bp, Homo sapiens; identical to SEQ ID NO: 565
  misc_feature (1)...(496): n = a,t,c or g

SEQ ID NO: 567 - DNA, 470 bp, Homo sapiens
  misc_feature (1)...(470): n = a,t,c or g
gacaacgtgaagatcatctgcctgggagacagcgcagtgggcaaatccaaactcatggagagatttctcatggatggctttcagccacagcagctgtccacgtacgccctgaccctgtacaagcacacagccacggtagatggcaagaccatccttgtggcagacataaacgtgacccaaaaaagcttcaattttgccaagaagttctccctgcccctgtatttcgtctcggctgctgatggtaccaatgttgtgaagctcttcaatgatgcaattcgattagctgtgtcttacaaacagaactcccaggacttcatggatgagatttttcaggagctcgagaacttcagcttggagcaggaagaggagaacgtgccagaccaggaacagagcagcagcatcgagnccccgccctcgtcccaagctaggcgtattgagacgacgccaatccatggccnccccccgcttnn

SEQ ID NO: 568 - DNA, 470 bp, Homo sapiens; identical to SEQ ID NO: 567
  misc_feature (1)...(470): n = a,t,c or g

SEQ ID NO: 569 - DNA, 470 bp, Homo sapiens; identical to SEQ ID NO: 567
  misc_feature (1)...(470): n = a,t,c or g

SEQ ID NO: 570 - DNA, 502 bp, Homo sapiens
  misc_feature (1)...(502): n = a,t,c or g
ggcacgaggggcaaagagaaagcaaagcagctgcgctcagacctgagctcctttgacatgttaagatatgttgaaactctactcacacatatgggtgtaaatccgctagaagctgaagaactcatccgtgatgaagatagtcctgattttgaattcatagtctatgactcctggaagataacaggcagaacagcagaaaacacctttaataaaacccatacattccactttctgttgggttcaatatacggagagtgccctgtgccaaagccacgagttgatcgtccaagaaaagttcctgtgatacaagaggagagggcaatgcctgcccacctgatacccccaatgtccttctttgactttgtgggtgatcctcattctttcccccgtacagtggaaaacatctttcatgtttccttcattatacgggatggtnttgcagaataaacttgaccaagaccgactgccagtaatagagcctgttagtattaatgaagaaaan

SEQ ID NO: 571 - DNA, 1405 bp, Homo sapiens
ggttttgcctcctgtgacttaattcctgtgcagaatttggtttgtttttacaatctagccttgacctggccttcagacttggtttctagctcatcctccccaaaactgcatgttttatcccagtggttcttaattctcaacatccatagtcctgcgcagaatcttaaagtttggttaagtgaaacagattttagaatttagtgtatatctcaaaggtcagaattaagaaattgccatgtttcttcaggtggtttatgaaataccagcatgtagacccagaagaagctgtaaggattcacactgatgtccaaacaaagaaatctatggcaattcactggggaacttttgccttagcaaatgagcattacttagagcctccagtgaagctgaatgaagctctagagagatacggacttaacgctgaagatttttttgtcttgaagcatggagaatcaagatacctaaataataatgatgaaaacttttaataaatgtgagcacaggcacttttaatgaaaaaggcatcatctaagtttaaaaacaaatgaaaagacttagaaattcatgaatattgtgattattttacatttggaaacaacttctgcaagtttatgttttatgttttgtgtaataacttgcttcctagtatgatcagctcatgtacactatgagagggttcaggggtgggtcatttaaataatgaattggctaatgtggattttaaatttcatatcatgatataagcactgcaatggaaatgtttttactaaaacattatatttttgtggtactagaatttcctgaggtgaaaaaccgatattgaagattcatttttcttttttccattcttcaggaccttcggcaaggtgagtcaaggctctctacctacctagatgtttttcagaggcctacaaatacaagtatctttcttatatgcacattctaataaatgatgaaattcagtccaacatgcttattataaacatagcaattcttgctctatcaaattagcttatatgccaaatattaaatatcggtttatttaggtaagcataaaaacataggggctatcatttttaaagacttgattttcccctattgggggaaaatatataaatacatatttgcccattttaaacatttacccattttaacccatttttaagtgtacagttctttcgcattaatgcacccatgacccaccattcacttaaatttttaaaagaacagtatattctttttttcctagaagccttcagatgagagggaacagtatattctattgcacgtctacaattcccaaaagacctcttactttgggaggccaaggtgggtgggtcacttgaacccaggagttttgacatcaacctgggcaacatgggtgacctcccgtctctctcggaaa

SEQ ID NO: 572 - DNA, 3198 bp, Homo sapiens
atggcatggcgtcggttgtcccggcggcgtgtcgctggcaatgaccggacatggcctgcaccacagcgacattggcggtacaccaccctgtttgagatgaagcgcagcaaagagctgcctgtgcgctggtgcgatttcagcgccttcacgccgatgatgcgcacccacgaaggtaaccgtcctggcgacaactggcagtttgacggcgacgcagaaaccatcgcccatttcgcccgtatgaccaccgtcttcaccaccctgaaaccttacctgaaagaggccgtcgcgctgaatgcgaagtccggcctgccgcaacttgtggatatcagagaggagatgccagagcagacagccaaacgaatgttgagccttcttggtattcttaagtacaaaccttcaggaaatgccacagatatgggtaaagaacaccggactttgccagctaatttcgcgtttaatgaattcgtagcgcggcacctgcgacaccgccgcacggttaaccagctccagccgggagaaaatcacctgggtggtggtgtcgcggtcgcgtcttcttttggcaccagcatcatcgccacgccaatcgccgttacgccgccgatcaacttgccgacaatcatcgggaagatcatggcgttcatgttggcagcggcgaagcctaagtggtcgcccagggcgaaagcagcggaaacggcgaaggcgcagttgatgactttgccgcggaactcggtgatcttgtttgcaagcaggctctcatcccacgctcctgcagggctccaaggtcacattaactttactattagtacaaagattctggacagcaatgaaccatgtgggggccagaaggggtttgttccccaaaagggccgaagtgacacgctcatcaagccagttctcgtcaaagacccaatggtgagtcagggtctacggtgtctcaagaattcggccacctccacgaccaacctctacacacaggccctgttggcttacattttctccctggctggggaaatggacatcagaaacattctccttaaacagttagatcaacaggctatcatctcaggattcattttagtaacagttattaagtcatcaaatgctgatgacacatcaatctacatgttttatcaaaaggtcggcgacaactcaatcgacagctggaaaaacgcgggccgtgtctttaaagacagcgataagttcgacgccaacgatccgatcctgaaagatcagacgcaagaatggtccggttgtgatccccagctcggatgcgatttcgtcgtatctgaagcgagggctttcgcgtcggatcatcgccaagccgaatggagcagcaaagacgactttatgcgtctgggtaaaccgattctgtttttcggtgttactgctggcaacatggattcgatgatcaaccgttataccgccgatcgccgtttacgtcatgacgatgcctacacgccggataacgtcgcgggtaagcgcccggatcgcgccacactggtttatacccagcgttgtaaagaggcgtggaaagatgtaccggtgatcctcggcggtattgaggctagtctgcgccgtaccgcgcattatgattactggtccgataccgtgcgccgttccgtgctggtggattcgaaagccgacatgctgatgtttggtaacggtgagcgtccgctggtggaagtggcgcatcgtctggcgatgggcgagccaattagtgaaatccgcgatgtgcgtaataccgcgattatcgtgaaagaggcgctgcctggctggagcggcgtggattccacccgtcttgatacccctggaaaaatcgacccaatcccgcatccgtatggtgaagatttgcctcctgtgcgttcagacgaacaggctgaagcactgccggaagcgtatgaaccgattgaggttaacgaattcggtgaaatcgatctgcttgcaatggttgaagatgaaatcatcctcgccttgccggtagttccggtgcatgattctgaacactgtgaagtgtccgaagcggacatggtctttggtgaactgcctgaagaagcgcaaaagccaaacccatttgccgtattagccagcttaaagcgagtaaggtccatggccgtacaacagaataaaccaacccgttccaaacgtggcatgcgtcgttcccatgacgcgctgaccgcagtcaccagcctgtctgtagacaaaacttctggtgaaaaacacctgcgtcaccacatcactgccgacggttactaccgcggccgcaaggtggtgtgggatgatgtgctcatgagtgaacaagggaagcagctagcttccaggtgtctaatatcctgggatggatgtgtgtggcatgacctgctgatgaaagatgcggctcttctgcgtctggaggccaatgcaaatgtaggttcatccagcactggggagtactatgggatgttccaattctggtatggtcactacccctatcaagtggctgagtatgatcagtgtccagtgtctggccaatggaactttcctcagcccttcattgaccaaatgccccaagggcattcgagccagcgttccattatctggaggccctcgttctctgaaggcacggaccttttcagctttttccggccagccatccagccagccatccagccagccaaccaactatccatccacaatttgtggacacaattccggcattcaaccaaaattccagttgaatgggtgaatggtgaatggctgaatggacgaatgccaggggatcatcatgaatggcaatgcaactatcaggacccaatggtgagtcagggtctacggtgtctcaagaattcggccacctccacgaccaacctctacacacaggccctgttggcttacattttctccctggctggggaaatggacatcagaaacattctccttaaacagttagatcaacaggctatcatctcagatttaccacacatgaaagctgccaaagcttatggctggcatcctctgaagcagcagccccagttgcagctggacccctttgagccacagctggagctggagcagctgggatgcaggaaacagtgtttggaggctgtgcagcagcttccaggagcagaagtggagctgcagctgcaggcagctcccggatccctgaggcgctccgggcggtggatgagagtgtcttactgcttaggccagacaaagagctga

SEQ ID NO: 573 - DNA, 429 bp, Homo sapiens
cccacgcgtccgtgctacccccgcggagttgtcgtgtgttctggattcattccggcaccaccatgtcgaaggtgtcctttaagatcacgctgacggcggacccacggctgccgtacaaagtactcagtgttgctgaaagtacacctttcacagcagtcttaaatgcctgtatgcagaacactgtacagtctctgctggggcggtgcaaccattaccagccaggcaacactgatttagccctgcggatactggagagcttgccgttgtcattctggcctactgaaaatgaagtgatttaaaattgcaaatttttgttacttcaggagatgttaatatataattttattaaaaaggtttattgaaaatcgtgaggcactttattgtatggatgcctttaaacttagtagacaaaggtttctttttttctta

SEQ ID NO: 574 - DNA, 1490 bp, Homo sapiens
cggacgcgtgggcgagaaaccaaaccacacaccaaagagaggggtatgatggctaagaagcccccaaaaccaggccctcgcaggatcttccaggaaaggttaaagattactgctctacctttgtactttgaaggttttttattaatcaagcggtcaggataccgggagtatgagcattactggacagagttgagaggaactactcttttcttttataccgacaaaaagagtataatatatgttgacaaattagacatagtagacctcacatgccttactgagcagaattcaactgaaaagaactgtgcgaaattcacccttgttttgccgaaagaggaagtacaactgaagacagagaacacagaaagtggggaagaatggagaggcttcattcttacagtaacagagctgtcagttccccaaaacgtgtcactcctacctgggcaagtaattaaactgcatgaagtcctagagagagaaaagaaaaggaggattgagacagagcagagtacgtccgtggaaaaagagaaggaaccaactgaagattatgtggatgtactgaaccctatgccagcatgtttttatacagtgtcccggaaagaggcaactgagatgctccagaagaacccttctttgggaaatatgatcctgaggcctggtagtgacagtagaaactactccatcactattcggcaggagatagacattccaagaatcaagcactacaaagtgatgagcgtaggacaaaactacactattgaactggaaaaacctgtaacactcccaaaccttttcagtgtcattgattattttgtgaaggagactcgaggaaatttaagaccatttatatgttcaactgatgaaaacactggtcaagaacccagtatggaagggagaagtgaaaagttgaagaaaaatccacacattgcatgaaatacaatgtgaaagctcctttgtatatcttggtaatttatattttcaaaacgaagttcttacttttaaagagaattacctatattctcctgatactgattaccaagtcattcacctgaacaccagaattagaattaaacattgtaccatacaatttcattatcttatcagaatgaaaccaattcacagggaaactagagactacggctgtggtggtaacctgcagatatacacattcccatgcactgacataagttgaaaacacatagtactttctagatggaatttttttttttagggcctcaatgaaatacattttcccctatataattccaacagcagtttctctagttctaaattttaccaattcccaaaaaacctaagttttgctgaaatctgatttgaccaatttatcaaatatgtcattttaattacctagctggaagttagagacatgaaatgtactagaggagcccttttccaatggaaatattatataccacattttttgttaatggaaataaatgtctccattcccaaaaaaaaaaaaaaaaaaa

SEQ ID NO: 575 - DNA, 371 bp, Homo sapiens
  misc_feature (1)...(371): n = a,t,c or g
cagcatcgggggcctgcaaatctagtgccgaatgactatgtccagattggtgacgatgggtgttgctgtttttcttgtcgtttgtgaacgctgtgatgctgtgtgcccaagtgggcagtcaccacccagcccttccttgggcgtctcccccagagtgctgtcgggaccacatctgtcctcaccctgtgggaccgcctggccctccctccctagcccttccagcctgggnnnnnnnnnnnnnnnnnnnnnnnnnnnnnnnnnnnnnnnnnnnnnnnnnnnnnnnntacctctcatgcgtgttttaccttttgatgttcagagtggctcactggctgagagtccttatctcggagagagggagaggttggttt

SEQ ID NO: 576 - DNA, 976 bp, Homo sapiens
aagggggaagccaggggcccatttgggggcccagcccccaatcccacccagcagaggaagccaaggtcggggcagctgtgattgctccctggtcctggagaggaaactggccatctgctttatctgaagattttcagctgatgaagaactaggaggctcaaacactatcttacctgagtccaggacaagtgacttggagagtgtgctcttctgtggcaggatcaggtctgtctagggcaggatggcccaggatctcagcgagaaggacctgttgaagatggaggtggagcagctgaagaaagaagtgaaaaacacaagaattccgatttccaaagcgggaaaggaaatcaaggagtacgtggaggcccaagcaggaaacgatccttttctcaaaggcatccctgaggacaagaatcccttcaaggagaaaggtggctgtctgataagctgatggcatggagccctgccctgagtgtctgtccctcttcagccaagcccaagtctcctagacccccagggagccagtgaactgtcaccttctcttcatcacagaatgagtaaagatcccttgaacaattgcattgtgaacccatttccccattcccacctttcactctttttttccaatatttcctccacctgctgggtctctgctgaccttgcttggggacactttgagggcagtgtggcttggccgagcggttgggcccatgggtggtggggtgtgaaaagcctgcaataccccaagaccccagagggcagtccttaggaagcacttaaaccaccctgggaacccctccgtcttttccctctactctcatcctaggaataaagcatttccacgccagagtagtttgggctgggggccagggttgggtggtcctgtccctccatatcatgtcctaccctatggtcctgttcctagtcatttagatcaccccagatggcctgatgacaacaagagtttgtgaagtta

SEQ ID NO: 577 - DNA, 3083 bp, Homo sapiens
cagcatcgcaggctttcctccgagtccccgcgctgccgatggacgtgctccctttgcttgttgtggaggatcctccaacgggggcagccagggggccggggccagaccctacaacccaccagcccccagaggtagctatttttgcagccagccgtgttgaaggtggacttcggccagagcaggagaacaggagggacgcgggacggcctcagatccggacgcccaagcaggggagggcagaacagacccgccacccagccagggtcagcagcggtggtggtggctctcaggagcccacacaggtcaacaccttcatgtccttcatattccccatggtggtcatctcggtcctgaacaccatcatcgccaacaagctgaccgtcatggtacgccaggcggccgagcagggccaagtgtgcacggtcgggggcgagcacagcacattcagcatggccatcgagcctggcagggtccaggccctgcggcacggcgtgcgcgtcctacgtgcagtggtcatcgcctttgtggtctgctggctgccctaccacgtgcggcgcctcatgttctgctacatctcggatgagcagtggactccgttcctctatgacttctaccactacttctacatggtgaccaacgcactcttctacgtcagctccaccatcaaccccatcctgtacaacctcgtctctgccaacttccgccacatcttcctggccacactggcctgcctctgcccggccaaggcccaggggctctgccaggacaccacatgggagggggctcaggcctcagcctcaagatcttcagctgtggcctctcgggctcggcagaagggacgccggatcaggggcctggtctccagcacctgcccgagtggccgtggccaggatggggatccaggctccacagagcacatgactagccaggcccctggcttaagaaggtcgcctaagcctaagagaagacagtcccaggagaagctggccgggaccagccaggagctgggagccacaggaagcaaaagtagggacacgtgtccacgcaccacagacacacccacgacacctgatctcgtatcactagcttgcggccaggtcatgatgtggccccggaagctggccctgcgtgccatgagtgcgtcggtcatggagtccggagcccctgagccggcccctggtgacggcacagccctcacagctcaaacgcccacccccactcccaccatctgcaggccagtgtccctcctggcccagagcggtacccgggccctcgactgctgccctccacgggctccctgcctgaacctgtccacaccccgattcgtccccagagttggacactccgtgatgtttaagggatccctgggctctgtgccaaggaggaaggagctggagcagcgaggcaacaaggcagatgggcgggctcacgtcagaaccaccagggagcctgttccagaccagtttcccaggccccagctgagccccaggcgatcagaagggcataggagatcactgcaccccaaccggaggaacactgacattgacgacaacatcataggaatggaaatacaaccatggaattccagctcagtcatggagcgggagatctggggacactggccgggcagcctgccccaggcacccctgaactccagtcccctgaagccagagcccgggccaactaaccaggtgactagcagagccactggggacacccccagccaggcccagaccccagccaattacccagggcctggagcaaggccctgtcagctcaacccccatcatctgacctggttcaaggcccatggccaccgagagccagtctgcagctgggcaaaagggcagacagggccaggtgaggtggacgtctcttgcacctacacatcctcgcgacaggaggatgcacgtcgtacagatggggaaacaggctgggaaagggagtgtgacctgcccgtgatcccagaggtgtggctaccagagctggaactaaaaccggagcccttcaccaaatccagctcccaggacctaagctggccttggatgaacccagtacggtgcctctcctgcctgtatcggggcatccgggcactgccagcgtcccattactggactctggtcaaggagcttggggacagagtggccgccgaggggacggagcctgccgtgtcccgtgtgcagcggcggaccaccaggcagagcgccaaggggagtgtccggagatccagcatgggaagagccccctgccacttccagcaaggagcacacagagagggggagcctcctgttaagcatccaagtcccaagtcaccggccggcatcggctgcagctctctgtgtgtggagacatctcattctggtgtcttctttacacagggtctgcatctgggggtccactggggaggactcagcctctcccgcgtcctccatcccacacacctgtccctgggcagccacggggaacaggagcacaggggacagcaggcagagggcagcgcccgggcgaaggggactttcgcccttgcttcatgcagccctggcacccgcagcaggacctcggctgatcccaagggggtccacagtggatatggtccttcaggggtgcccttgaaggcaggaaggggacaggactttatactgttcctcccaccccttcgagcagtcaccaactgcagcccagatgaggtcaacagcatgtctgatggcgtggtccccagcctgcctgatggcgtggtccccagcctgtctgatggcatggtccccggcctgtctgatggcgtggtccccagtctgtctgatggcgtggtccccggcctgtctgatggcgtggtccccggcctgtctgatggcatggtccccggtctgtctgatggtgtggtccccagcctgtctgatggtgtggtccccggcctgtctgatggcttggtccctggtctatttgatggtgtggtccccagcctgtctgaaggtgtggtccccagcctgtctgatggcgtggtccccggcctgtctgatggcttggtccctggtctatttgatggtgtggtccccagcctatctgaagatggggagaggagctga

SEQ ID NO: 578 - DNA, 411 bp, Homo sapiens
  misc_feature (1)...(411): n = a,t,c or g
cccactactcggggctccgctcggcttcttcgcgccgagatgcctaagaaggctggtgcgacgaccaagggtaaaagccagagcaaggaaccagagagaccacttcctcccttaggtcctgtggcagttgatcctaaaggatgcgtcaccatagccatccatgcaaaacctggctccaaacaaaatgctgtaacagatttgacagcagaggctgtaaatgtagctattgcagcacctccatcagagggagaggctaatgctgagctctgtcggtatctttccaaggtcctagaactcaggaagagtgatgtggnnnnnnnnnnnnnnnnnnnnnnnnnnnnnnnnnnnnnnnnnnnnnnnnnnnnnnnnnnnnnnnnnnnnnnnnnnnnnnnnnnnnnnnnnnnnnnnnnt

SEQ ID NO: 579 - DNA, 994 bp, Homo sapiens
ttttagtactgttttaggtattggggatataccaaggaataaaacaagattcctggagggagaggggaacggacagcaaacaatagacacaatacgatcgtgaggtatatagttaatgttggtgatgagtgctcctcaaaggaaacaactaaaaccagacaagggaagtcggggtgtcagggagaatggtttgtagtattgatgacaatggttaaggaaggcctgagttctgcaaagacctcaaggatatgagggactagagtgccctctgctgtggaagagcctgcgcaaagatcctgaggtgggaggggtcagggagccaactcattttacggtaagtggaggtgggatccaggggaggattctgagcagaggagggacgtggcccaatttgggctttgaaaggatcctgcttgtctgtgtgccagcatcctggtggtggttgggggagtctgcatcaatcctgggtgctgttacctgaaaaaatagcaggtgttagacgaaagaacagatgtctggcccattgtttccagtctgttcctgtccacagcttccctttatgctgagcccctgccacatgcatcatcatcctggccatgtggcattgtcacagaccgtctctcctgctagcctcctaactcagggcctgggtcttccccagcattaagtaaatcagtctcaggcagacagccctttataggtgtttgggccaggtgcggtggctcacgcctgtaatcccagctctttgtggggccgaggtctttgagctcaggagttcaagaccagcctgggcagcatgacaaaaccctgtctctaccaaaaatacaaaaattagccacgcatggtggcacacacctgtggtcccagctactcgggaggctgaggtgggaggatcgctggagcctgggaagttgaggctgcagtgagccgtgatcatgccactgcattccagcctgtgtgatggagagagaccctgtctcaaaaaaaaaaaaaa

SEQ ID NO: 580 - DNA, 826 bp, Homo sapiens
aggaggaggagtaggaggaggaggcggcggccatttgggctaggacagtaaaggcaggtgagggtgggggccctggctggctggaggagattgtataaaagaaaacacgtgacacaaggaggggagcaggcaggtgttttaggaaaggtctggtccaggcaggaaggtgggatgtttattccagagcaaaatggccttcgtccgtctgttctaaccgccatgcccacttcttccacagaactacaattacaaccagcatgcgtatcccactgcctatggtgggaagtactcagtcaagacccctgcaaaggggggagtctcaccttcttcctcggcttcccgggtgcaacctggcctgctgcagtgggtgaagttttggtaggtgagtgtcagagtgagccgacccaggccacatcctggcagtggaggcacagtcacccggggcagggccaggatcttggtatatcctcagatctcagtgggcagcgacatgaagtcaggcaatttcttgcaaccaccaccgaggccccgaaaagcactggtcgtcagggagctcctccccttggcccccagcctgtgccagccctggcccggctgccacacctctgtttcataggctggggacccaggctggtttctcctggtttcttcccactgcactgtggtgcttcagtggccaccagcctcgtcacatacaccagcatctttctgtacctcctccctttggtgacctgaagtcactgtgacagttctccaggaaggaggagcttcctacttttgagtttctctgtggaaataaaacatgaatcttgtttccctaaaaaaa

SEQ ID NO: 581 - DNA, 1266 bp, Homo sapiens
atgactcgccagtgccaggcctcaaaccaacagctcgggccccagcccctggccacaacgccacctgacctgttcctgggttttcagcagctgtttgggacctttgctagctggggccgggagccccactgcgggggccccgatttcccccaacccatccagaccgttgaagatgcccttaggaagccttcaggacttcagctgattaattacattcacacttatcttccacttcctgcaaaggtactggatttccctcccaaacctcctcaaccaggaatggatgtgcagggatttgtgctttacctcatgagccctccagcatcccaaggacatcctgttcctaagtaccaaatacacagaacctttcgacctgcacctccaggaggtgtggcaggcgtgcttgtgggacacccgtttgacacggtcaaggtacggcttcaggtccagagcgtggagaagcctcagtaccgcgggacgttgcactgcttcaagtccatcatcaagcaagagagcgtgctgggcctgtacaagggcctgggctcgccgctcatggggctcaccttcatcaacgcgctggtgttcggggtgcagggcaacaccctccgggccctgggccacgactcgcccctcaaccagttcctggcaggtgcggcggcgggcgccatccagtgcgtcatctgctgccccatggagctggccaagacgcggctgcagctgcaggacgcgggcccagcgcgcacctacaagggctcgctggactgcctcgcgcagatctacgggcacgagggtctgcgtggcgtcaaccggggcatggtgtccacgttgctgcgtgagacgcccagcttcggcgtctacttcctcacctatgacgctctcacgcgggcgctgggctgcgagccgggcgaccgcctgctggtgcccaagctgctgttggcgggcggtacgtcaggcatcgtgtcctggctctctacctatcctgtggacgtggtcaagtcgcggctgcaggcggacggactgcggggcgccccgcgctaccgcggcatcctggactgcgtgcaccagagctaccgcgccgagggctggcgcgtcttcacacgggggctggcgtccacgctgctgcgcgccttccccgtcaacgctgccaccttcgccaccgtcacggtggtgctcacctacgcgcgcggcgaggaggccgggcccgagggcgaggctgtgcccgccgcccctgcggggcctgccctggcgcagccctccagcctgtga

SEQ ID NO: 582 - DNA, 1944 bp, Homo sapiens
gtgactgaggcgagatcttccaccctcctgctccagggcctctaggtggcctccagagtgggctccacagcttgaaggcggcgtttttccgcgggtggtcgcagcgtccgcagagtcggagaaagctgcgtcagagactgcaacagtcagcacacattcctgtctgatcaggctccctccctcaagtcctctgcgatagctctggcgatgcttcaggactggtgcaggaggatgggtgtgaacgcagagcgctctctgctcatcctggatatccctgacgactgcgaggaacatgagttccaggaggccgtgcgggctgccctgtcgcccctgggcaggtaccgagtgctcatcaaggtcttcagaaaggagctcggggccagggcagccttggtggaattcgctgagggtttaaaccaaagcttgattccccgccaaatagcaggcaaagggggaccctggaaagtgatctccctgccccaggcccttgatgctgagtttcaggatatacccagtttccctgcacagccccaggggcaagcagtggccagaggtgcaggtgaagcaggagctgcaggtgaggcaggatctgtaggtgaggcaggaggtgtgaatgaggaaagatctgcaggtgaagatgaggcaggaggtataggtgaggcaggaggtgtaggtgaggcaggagcagcaggtgaggcaggagcagcaggtgaggcaggagcagcaggtgaggcaggaggtgcaggtgaggcaggaggtgcaggtgaggcaggaggtgcaggtgaggaaggaggtacaggtgaggaaggaggtgcaggtgaggcaggaggcgcaggtgaggaaggaggtgaagatgaggcaggagctgcaggtgaggcagtaggtgcaggtgtggtggaggcctggacccagtcatggcgccagaccctgcggcctctggtgaaaactatggcctaccgggaactgagacccttttccgggagggagcagccaggctgcgtggaagagtcctttgagagctggttggaggacgccaaggatatgctgcagctgtggtgccacgcgtcggaaagggagagaaggaggcggctgctggacagcttggatggcctggccctggatatcgtgagcggcctcctggaggaagatccagacttctctgcgcaggactgcctgacggcgctggggcaggtgtttaggagccgggatacatggatgacctcgcggatgaagttcctgacctgcacgcaggggccccaggaggggctgtttgccttcgtggtgcgcctggaaggcctgctgcagaaggccgtggagaagggggcggtccacccagccatggccaaccacctgcgactgcggcaggtgctgtctcgggcccgccccagcgaggcactccaggataccctgaggaggatgcagctggagaggaggccacctgacttcctgaggctgctgcggctcatccgggacatggaggcgtgggcagcctccctagcaaggagccagcagggtgtggcctgggcagcggccccagtggagagtgaagacccagctgctgcccaggcctccccggcccagggggacgccagcgaggctgatcccggagcagaagatgctgatgaggctgcttccaccaccaaagaggccgccagggttgcccctgccactggggaagatgaaaatgcccctgcaggccttgaaggcctaggtcagggaaggtcccccgacgcccctgggggcctcccagccaggatgggcagtgcagtcgacatggccccaggaggtcccagctgggagccagagggccttgtccaggttggaggccaggaggctgaggagcctccccaggaggggctcaagcccatcttagaggagtcagaaaacgaggatgaggatggggctggggaggcgggcaagcccaagtcccccccgggcaaatag

SEQ ID NO: 583 - DNA, 2394 bp, Homo sapiens
acttggaaaagcaaggagtgtcgggaatggcgaccaagcggctcgcgcggcagcttggattaattaggagaaagtcaattgcgccagcaaatggaaatctcggaagaagcaaatccaagcagttgtttgactacttaattgtcattgattttgaatcgacatgctggaatgatgggaagcaccaccatagccaggaaataattgagtttccagcagtgttgctgaacacatcaactggacagattgactctgagttccaggcttatgttcaacctcaggaacatccaattctttcagaattttgcatggaattgacaggcataaagcaggctcaagttgatgaaggagtccctctgaagatttgcttatctcagttctgtaaatggattcataagattcagcaacagaagaacattatttttgctactgggatttcagagccttctgcttctgaagtaaaattatgtgcatttgttacttggtcagactgggacttgggggtttgcctggagtatgagtgtaaaagaaaacagctgttaaaacctgtgtttttaaattcttggattgatctcagagcaacttacaagcttttctataggagaaaaccaaaaggactaagtggtgcttgcaggaagtaggaatagaattctcaggacgagaacattctgggttggacgattctcggaatactgcccttcttgcttggaaaatgatcagagatggttgtgtaatgaaaattacaaggtcgttgaacaagttcccactaagaagaatttcagcattctggccagaaatttgaatacaattcaagttgaagaaatgtctgcctgtaacattagcatccagggtcccagcatatataataaggagcctaaaaatataataaatcctcatgaaaaagttcaaatgaagtcaatttgtgcaaattctcctataaaggcacaacaggatcaattacaagtaaaaaacaatataaaagcaagtcttcacaatgtcaaaagttccttacctctttttaatactaagtcctctacttctgtggggcagttgcagtctcctaccttgaattcacctatctatatgcaaaagcaaggaaaaaatgaacatcttgcatttaataccaaatctaaggcttcaacagttggttcagaattggtacttgtttctaccaccgttccaactgttcatcatgtttctgatttggaaatgagctctactctggactgtttacctgtgttggctgattgggaggatgtggttttactgccagcatctcagcctgaggaaaacgtagactgtacagttcccattagtgactcagacttagagatttcatttaattctggagaaagattaatggttttgaaagaattggaaatgtcaagtcatgaaaactttggagacatagaggaaactcctcaaaaatctgagacttctaagtctattgtgtacaagagtcctcacactactatttataatgtaaaagaagccaaagatccaggttcagatatttctgcctttaagttacctgaacacaaatcaagtaccttcaacagagttaatgccaatatgtctcatcctttagttttggggaaacatcctcttctttcaggtggtaccaaaaggaatccatgcagtccccaagctttcccaccagcaaaaaaacaacccttcactattcatgaagaaaagcctacatcatctgattgctccccagtaagaagttcttcctggaggcgtctcccatctatattaacttctacagttaacctacaagagccatggaagagtgggaaaatgacacctccattatgcaagtgtggtcggagatctaagagacttgttgtttctaataatggaccgaaccatggaaaagtcttctattgttgccctatcgggaaataccaagaaaacagaaaatgttgtggttatttcaaatgggaacaaacacttcaaaaggaaagagccaacagcatggttccatctcattccacagggggactcacttttagttctccagaaacaagccatatttgtgacagaaatttaagtatttccaccaaaaattctttgagactcaggccttcaatgaggaattgataacctttcatgtatgaatcctaattgttccttgaatttccaaacatgagtattctgataacatcttacactattttatttttattttatatattaatgcttactgcatttaccatactttcttcaggaaccacaagtgtaatcttttgtaaacagtatttattagattacatataataagcaacaatagtatatgatccttcttttatagttagaccttgaaacaagtctaaactatttttaaattatttgcacaaaatgtgactaaaaaaaaatccctagtctattttcagg

SEQ ID NO: 584 - DNA, 1685 bp, Homo sapiens
tttcgtggcgtgcggcggaggcgaccataatgttgttaggggcatttgtgtctcgtccgcgggaagaccggcggagcccataaggccttggggtggaattctgagagctgattcctgccttgacttctccactgttcctggaggaatccgagaagagcagagcggagggagccccagacacgggccgcggcagagctcgcggagcttggcgagtgtttcctggcctctctggttggtcagcacccccagccagctggcccaggacccctctacagatgtccaggagagcaggcgttaccaagatgtccgaccccttcctgaagctagtcttcatcaaggacacgacattccgccccaagcgcaagttagagccaggcacccagcgcttggagctgcacaagaaggcgcaggcgtcgctgaacgccgggctggacctgcggctggccgtgcagttgcccccgggcgaggacctgaacgactgggtggctgttcacgtggtggacttctttaaccgcgtcaacctcatctacggcaccatcagcgacggctgcacggagcagtcctgccccgtcatgtcggggggccccaagtatgagtaccgctggcaggatgagcataagttccggaagcccacggcactctccgcgcccaggtacatggacctgctgatggactggatcgaggcgcagatcaacaacgaggacctcttccccaccaacgttggcactccgtttcccaagaacttcctgcagacggtgcggaagatcctgtcgcggctgttccgcgtgttcgtgcacgtctacatccaccactttgaccgcatcgcgcagatgggctccgaggcccacgtgaacacctgctacaagcacttctactatttcgtcaaggagttcggcctcatcgacaccaaggagctggagccactggtgcgcgggcttggggctgagggcgtgcggttacgctggcggccccggctggagttgggccccggggaccctgctgatgggacaagtggtgaggtagctgggagggatcctgcgttctcccacggaacaaatgccggcgacagatctgaaaatgctgactctctggcctcatggggtagcctgctgcccctggtctcagaaagaaatgaccgcccggatgtgccactgagacgccccgcgggtctcccggtgcccgaaccgccgctggggcctcggagacttggaggaggacgctctggaaccatcatcccgcttctctccggcctgagcatctcagggagaccaggggccgagccgctgagcaggtgttggtcctcaggagctccaacccgcggactgcagatgccttcctcagtctcgagcctcagtctcccgtctgggactaaaacgtgaactctgtaattctatgtgttactagcaaccggaaaagcccactgtgtttttaaaccacttccactttccaggaggctggatggcttccagggtcactccttgccctgggtggctcccaggctcctggaacttctgcctccacctcgctggggagcccccagggctgctgtggccacagccctgcctgggcctgtctctcaagggcacccagcttgctcggcctcctacatgtctcccgttggggaggcaagaggctgaggggcttccgagcccctgagagcggacatctcctcccgcaggccttta

SEQ ID NO: 585 - DNA, 1595 bp, Homo sapiens
atgctgcccctgctcgccgcgctcctggccgccgcctgcccgctgccgcccgtccgcggcggggccgcggacgcgcccggcctcctcggggtgccctccaatgcttcagtcaacgcgtcctccgcggacgagcccatcgccccgcggctgctggcctcggcggcccccgggccccccgagcgcccgggcccggaggaggcggcggcggcggcggcgcctgtgcaacatcagcgtgcagcggcagatgctgagctcgctgctcgtgcgctggggccgcccgcggggcttccagtgcgacctactgctcttctccaccaacgcgcacggccgcgctttcttcgccgccgccttccaccgcgtcgggccgccgctgctcatcgagcacctggggctggcggcgggcggcgcgcagcaggacctgcgcctctgcgtgggctgcggctgggtgcgcggtcgccgcaccggccgcctccggcccgccgccgcccccagcgccgccgccgccaccgccggggcgcccaccgcgctgccagcctaccccgcggccgagccgcccgggccgctgtggctgcagggcgagccgctgcatttctgctgcctagacttcagcctggaggagctgcagggcgagccgggctggcggctgaaccgtaagcccattgagtccacgctggtggcctgcttcatgaccctggtcatcgtggtgtggagcgtggccgccctcatctggccggtgcccatcatcgccggcttcctgcccaacggcatggaacagcgccggaccaccgccagcaccaccgcagccaccccgccgcaagtgcccgcagggaccaccgcagccgccgccgccgccgccgctgccgccgccgccgcggccgtcacttcgggggtggcgaccaagtgacccgctccgctcctccctgtgtccgtcctgtgtccgcgcgcgcgggtgcctttcccgccggggactcggccggtgtgcttcgtgctgtagttatcgttagttcctcttcccgagatggggccgccgagagaccccagcgsctttgaaaagcaaggtttgtgctgcgcttccagttccgaaaagcagatgtttaagcccttggactgagggtgggatcgcagactccgcaagacggagaggagggaaatggggcccttttcccctctattgcatcccccctgcccgactccttccccgcacccacggtgccctagattcatggcagaaaatgacccaaatccctgtgtatttgttttatatatttaataaactgttttaaaatgaaagttttagttaaaaaaaatacaaaacaaaaagattaaattgctattgctgtagtaagagaagctctttgtatctgaacatagttgmtatttgaaatttgtggttttttaatttatttaaaattggggggagggcatgggaaggatttaacaccgatatattgttaccgctggaaaatggaactttatggaaccttttccaagttgatctatccagtgacgtggcctggtgggcgtttcttcttgtacttatgtggttttttggcttttaatacagacattttcctccaaaaaaaaaaaaaaaaagg

SEQ ID NO: 586 - DNA, 1987 bp, Homo sapiens
atgagtaagccagaatggttgatagtgggggaggatgatgacgacgctgcctttgcccctgtcttgtgtgaaacaactgcctgtgggtttcctgcagcgcagtggggagtgagaggagaaacgtcctgccgtgccacacccacgccctcccctgcgaacgcgcacgtgaacgggagcgcggacgcgcccgagaatgcgcttcacctcgcagaagcggcacctcggctgctgcccggcagcggcagcagctgcgtcggcggcccacacagcagcgagaggcgagaggaggctgcctcgaggaggctgcctcgaggatgaagtgcaaacccaaccagacgcggacctacgaccccgaggggttcaagaagcgggcggcgtgcctgtgcttccggagcgaacgcgaggacgaggtcctgttagtgagtagcagccggtacccggaccgctggatcgtgccgggcgggggcatggagcccgaggaggagccgggcggtgcggcggtccgagaggtgtacgaagaagcgggagtcaaggggaagttaggccggctcctgggcgtcttcgaacagaaccaggatcgcaagcacagaacgtacgtgtatgtactgactgtcacggagctgctggaggattgggaagattcggttagcattgggaggaagcgagagtggttcaaagtcgaaggaatgcaatccaaggtcctcaagtgcaacaagccggtgaaggcggattatctgaagaacttaaacctgggcggtttccccaccaattggaaattcatgggcccattcttggcagatagcgattcctaatggacagccaagatgttcagtattgtgctgaaagaaacattgatgtgaacccagtgatcagtggaattgtcaagtacaggtgagcacttctgtgttcccaagaagacagctcatctggtttcttcctgcatcttgggacactccttccctgtctataccactgactcttgctctggttgttgtactcttatacgtgaatagactcttaattcagcacctatagccttttgttgtgcttttttgatgtgtctgccttcattagactatgatgtctttgagagcaaagactatttttccttactctttgcatattctgcatctgagacactacttgaaatatggttggcatcactgaaggttctttgattcaattaatattttgtaatcaccgtgtggcaaaacattccccttccaatctggtgctagtagagtatatgctatctaggcaccatgtgtgtggcttttgtgtatcaggtgtttcagaaatatttcaagaccagtgtaagatgtttgaggacaagaattattactcctatttctatgtcataccacacagtagctgcacagttttaagattatgccatcacctagggtaatgttttgtagaatcagtccttcgtgtaacaactctagtgtttttgtactgttgatgatttgcttaaattttattcaaaaactatcacttgctataaaggtaattgtaaaaataaatacagtggacgcaaaataatgttgtgagtttttataaaaataaattttaaaatgatatataagacatttttttgcaatgccctgccctaaccacttcttacatgtcatcttaacatctctttgaggaaacactgtttcctcattttacagatttaacatactgtattatttgatgccagagccaacaggtaatatcataggcagtttccaaacttaattatgccatttagtttgtctagatttcttttgcctctctcactgatccatttggctgtagttttcatcccttttccagtacacacagctagctcctcatcctacctggggttctgcatatgaggaatgcagaggggctgaggggggggcaaaattgttgttcatttaggaaaagggcctttagggaaagagggctgctattagaggggaacacaaagtgaaggtttttttaaaaaagaggacttgca

SEQ ID NO: 587 - DNA, 2707 bp, Homo sapiens
cggacgcgtaggggccgagatcccgggcacgctggttctggtgagcgcggcctccgcggctccttggccccaggatgccctctctcgtggggaaaggagggtcgggaaaggccgagcgtaagtccaccttctccaatccctgcctgctgggagaggacgatctcttgagaaaggaaagacttctgtgctcccgagaacttcctatcaggtcctggctgcagggaaacaagctgggctttttataattaaggttggaagaagtcaccacaggcagcagaactccatcttgagatgaaataacatctacctggacctctgtcagaatttcaaggcacacactgggctgactctggcgccatgatgttgccttatccttcagcactgggagatcaatactgggaagagattttgcttcccaagaatggggaaaatgtagagactatgaagaaattgacccaaaatcataaagcgaaaggcttgccttctaatgatactgacctcccccaaaaaaagggagggaagggcccaaatagtggtaccagttacattcagggatgtgactgtgatcttcacagaagcagaatggaagagactgagtccagagcagaggaatctatacaaagaagtgatgctggagaattacaggaatcttctctcattggaaaactttcattcttcagcagaaccaaagccagaaatctacacttgttcctcctgccttctggccttctcctgtcagcagttcctcagtcaacatgtacttcagatcttcctgggcttatgtgcagaaaatcacttccatccagggaattctagcccagggcattggaaacagcaggggcagcagtattcccatgtaagctgttggtttgaaaatgcagaaggtcaggagagaggaggtggctccaaaccctggtctgcaaggacagaggagagagaaacctcaagggcattccccagcccactccaaagacagtcagcaagtcctagaaaaggcaacatggtggtagaaacagagcccagctcagcccaaagaccaaaccctgtgcagctagacaaaggcttgaaggaattagaaaccttgagatttggagcaatcaactgtagagagtatgaaccggaccataacctggaatcaaactttattacaaacccgaggaccctcttagggaagaagccctacatttgcagtgattgtgggcgaagctttaaagatagatcaaccctcatcagacaccatcgtatacactcgatggagaagccttatgtgtgcagtgagtgcgggcgaggttttagccagaagtccaacctcagcagacaccagagaacacattcagaagagaagccttatttgtgcagggagtgtgggcaaagctttagaagtaagtccatcctcaatagacatcagtggactcactcagaggagaagccctatgtttgcagcgagtgtgggcgaggctttagcgagaagtcatccttcatcagacaccagaggacacactccggtgagaaaccctatgtgtgcctggagtgtggacgaagcttttgtgataagtcaaccctcagaaaacaccagaggatacactcaggggagaagccttatgtttgcagggagtgtgggcgaggctttagccagaactcagatctcatcaaacaccagaggacacacttggatgagaagccttatgtttgcagggagtgtgggcgaggcttttgtgacaagtcaaccctcatcatacacgagcggacgcactctggagagaagccttatgtgtgtggtgagtgtggccgaggctttagtcggaaatcactcctccttgtccaccagaggacacactcaggggagaagcattatgtctgcagggagtgtaggcgaggttttagccagaagtcaaatctcatcagacaccagaggacgcactcaaatgagaagccttatatttgcagggaatgtgggcgaggcttttgtgacaagtcaaccctcattgtacatgagaggacacactcaggagagaagccttacgtgtgcagatgtatgggcaaagcttttgtgatcacacaccacagggagaatctgcatgtggggacactgtggagctctgcccagatgaccttttcaggggtaacaccccagctgcttgagagaacagtgttgctgctggcagagatgcattccagagatgcactccgctctggaactcactctcagccacagggagctgcatgcaccacaggggcaatgcacctttgcaggggtaccttctggccccaacccttgactcaacggggacaactccagaaggtcattccagatccagagatccccatcgaactgaaggatcactgggttgcagacacattgcaggtcccacccataaatctcatcataatggcaattgaatttcaacatgaattttggaggagacattcacaccatagcatcaattacgcagtggctcctcagtcaggtctgatgagggaaaaggatgtgcatgtctgggagtgtgggcccccaccctttgccagaactgcccctataacaccaacttctgatcagaattggaggccactgagggaaaagaagggtcactatcaggacctttccactccatcccagaaggaaacagaattgaaacgtactagagtttctctcagaagaaagagagatgcaaattctccactccaggactatggctttggtgcctaa

SEQ ID NO: 588 - DNA, 411 bp, Homo sapiens
tcacctggaaggcagatctatttgagaatctggactgtctcctatcatgattcccgggaaatatcgctctgtttctggccgggctgcgaacaacgtgaactgcgggcttcatctggttattcaaacatcatcgcttcctgaaaaaaacaaaacaaaagctgaccgtatgtcctatcatcaatggggaagaccaccttcgtttgttgaactttcaacacaattttataactcggatacaaaatatttctaatctacagaagttaatatcgttggatttatatgataaccagattgaagaaattagtgggctttcgactctgagatgtcttcgtgtccttctggtggggaaaaaccgaatccagaaaaaccttcatctggagaatttaaaaaagcctaaaaggccttggatct

SEQ ID NO: 589 - DNA, 423 bp, Homo sapiens
tttcgtgctcgggagacatggcgggcgttaaagctctcgtggcattatccttcagtggggctattggactgacttttcttatgctgggatgtgccttagaggattatgggtaagttatcatttcaaaaagaactattcctctttctgtgtctttgtcactattagtatgggtgttagagagttcggtcaatttagcaccaagttctaaccagtgagttagtggagcccagtttatgaacacagtccctttgtgggtcaggtgtacttttgcagagggctctgttaaaaattgatgcattcatctccatacagcatttgtttaacacctactctggactagctggggacacgcaaacgaagagagagtcctgtcctcaaagaggaggtaaagttctagttgtgagtgagagacaggcaaacggc

SEQ ID NO: 590 - DNA, 3707 bp, Homo sapiens
  misc_feature (1)...(3707): n = a,t,c or g
atggcttcttcaaagctccgagaacccgtggatgaagtttttgacctggacttggctgtgccagagacggccagactggacagcagtttacacaaggcccgggcccaactgttggccaagggccggagacaccggccatcccgctccaggcttcgggacagtgccagctccgcggaggatggtgaaggctcggatgggcccggaggcaaggtgaccgatggctgcgggagccccctgcaccggctgcgctcgcctttgcactcaggcccggggtccccggccgggggctctttctgcctggatcctccggggttgcggcgcagcctggacgaggacgagccgccgccctcgccgctcacacgctaccggcccctgcacaacgctgcgtcgcacgagggcctggccgccgcctcctgctctccgccgcgctccgcgccctcctccgacagctcccccagcttcgtgcgccgccacccgcgcgcagagccgcacagcgaagatgacagccgtgacgccagtcctcctgagcccgccagccccaccatcggcctcgataagaagactcgccgaaagttcctggacctgggggtcaccctgcgccgagcatccacgggcaagagccggaaggagaaaggcagcaaccgactgtccatgggcagcagggagtcagtggaggggtccggcaggtcagggggctccccgttcctgcctttttcctggttcacggacagcggcaagggctcagcatcctcgggtagcaccacctcccccacctgctcccctaaacacgagggcttcagccctaagaagtcagcttcccaggcccagctcctggctcatgcacaggaggcactgagcaactcctggtgcctagtccaggacttcggctccacccagatagggatggaatccactctgagtgatgactccacgccccccagcagcagccccaagatccccagtgggccctggcaggaggccaaatgttcttacccctaccacacgctgtctcagtcttcagatgagttcctggatgaacccctcccccctgtccaccactggaccagccagcaggtgggccagtggctgcagagcctcaacctggaacagtatgctgctgagtttgctgcacggcaggtagacgggccgcagctgctgcagctggacggaagcaaactaaagagcctggggctcagcaactctcatgaccgggcactggtgaagcgcaagttgaaggagatggcagcagctgccgagaaggagcgcaaggcccaggagaaggctgcgcggcagcgggagaagctccggcgccgagagcaggaggccaagaagagctaggggagggtgcacaggcgctggcacccggcaggggcagccactggctccgcgggcacaggcctcaccagggaggctggacctgggcgctgcacttgggctagcctggtcccacgctctcaggggggacatgctctctcttaccctgtcacttggtctagacccagagaccccagaaagggagaccccagggagagggcctagtaataaatcctattttgaggacttgtttggcacagagttcctgggggaggagcagatgaaggggagagggcagagaggccagggctgaggcaagtctgggaggctgggtcaggctgtcccattgccctcaggccatcgtggggctggggtggaggggagctaggaggcctgcctgcctgcttgcctgccagaggccctgaggccgggcccccagggctcagagctgggctgggcatttcagcaggagcccatgtgggagcggctcctctccactcttccagggggctgtgtggtgggagagctctgtcctgctcccccaagaggccagtgggcgctgcagcaagtcgcactcagggtagactcccagccaaactcctcaacaggagcgcagagaaagcagcctggggcgagtgcagtctttgccaggactcaagaggggaggatgaacatccccttctccctctcccctcctctgtcctgtgggtcccagggggcgagatgacaccacacaggtctgcctctcagggcccattcaagacctggtctttgacccattctccaagccaggactcccttcacttcctgctgcttcctcagagggcacctaagtcctctttgggagctgagcaaacaggaactgatagggacagaggacaccacttccaccagccaaggcctaggagctgctgacctggtcagccctcaccccagccaggcagagaggcaaaacctgggggtccccggcagctacgagattggaaaggttcatcagccctcccccatctgccccaggcattgtcagggaatcagtgggctcagaactggcaggcggtgcaagctctgcttccctgggccacactgagggctggggccagctccctggatgggggtggagtttaccagcagcctggggacagcatgtgtcctttttaggaaatgtccttggaggaagtgttcatgtgtggcgctggtcagcagctagtcccgcttccaggacactggtcagagttaccgatgaggcctgggggctcccgcttggaaacccctccagctcctcccatctgcccagacagagcggcagatggcaccaatgcatgctggctccctcattcctgcccaggggctgtggcttacggccagcaccctgtacctgggactcagcccttatcccccctctgctatctgtgctgggagaggggcttcggagggaaacagatatgaggacactggcaccatctgggcctggtggcagggccatgggaggttggaaggcacccacatccttaaagccatcagtagctctagtgggtgcccaccttgcatgtgaaggggaggcagttcttcaatttatttcaataaatccttatgatgtgccagtgaccagaatttctgtctgctccagttgttgggttggccggactctgctgggccctgagtatggtgggacaacaggtctgtcaccaggtgctgggccatccggcgttctgaacagatggctttgccaggtgttttactcacagtcctgagctgggccggacgtccccggtgcgtcatgtgggtggtcacagggcaccgcagtgtgcgtgtgtacgtgcgcacgtgtgggtcccctcccccagggatgcagccaggccagtctcattcagtctcctctttactgtgggtgtgggtgtcactggtcactgccacagccactgggagggacacacagctttaacccctgtgtgcttaggggaagggtgggggcattcagggttataaaactaactatatacacagaaggtcctagggagaaagccaccctgagcacacatgtctgggcacagtgggggcctgggggctgaagctcaggcaggatggactaggcttgtggaggagcgggtgggcatgagcatgtgaggacatgctgggagggctcaggaggtggcacagacattgccaaggccactgcagggccttcgagcagcttggctgggatgggcaagcttcttcggttttaacaaggttctttccacttttaggagtttngggccctgtgagagccaccccttccgccaccgaccttcaagccctgagccgaagggagaggctgcaggaccagcctcattccccactcacgggtgtaactcctttccccactcagtccccaggtctagagggcacccacc

SEQ ID NO: 591 - DNA, 396 bp, Homo sapiens
atgactggcagtctgtttaggcgaggcccagaaacagaaagcaagtcttgtgaaagtcagaatctgggagctttgcagatgcgtcaagatgtgacccagcacattcacaggtctggtggctacgaggagagaccacttctgcttgagaagaacagagggaagaataaaggggactccgtcttgagcttaggtaccagcttagccacagtgggaaagagcaccaagccagctctttgggtccctgattccagtccttggctcttggatggcatctctggacctattctaggccagagaggagcccactgccctgaagggcctgaatccttgtgccagcagcccacaaagaggcatgccacaggtgagcctcatcatccttctgatggcagcagttaa

SEQ ID NO: 592 - DNA, 1181 bp, Homo sapiens
ttctggtcacggttagccaggctcgccgggaaagttgccagtaactggctgaacacaccgttgatgatctgcgctacctgctgtacctgcggcttttcgtcgtactgttccggcatgttgttggcgatcagacgcatctgctcacggtcaaagttgaccatctgtgcggcgatgtttttcatagatccaccccgtaaatccagtctgtgtttgtcaggtcgagttttggtttgctggctgtcacgcctgcctgttgcttgttacggttgatttcgagttgggtccacttatcgcggagtttggccgggctcagcacgttaccggaccagaagttgtcctggcatgcccagcggaacagcacacacatgtcgcggtggttacgtccgtcacgttcacgcatcaggcggatatcgttagcccacccagcaaaattcggttttctggctgatggtgcgatagtcttcaccatgtcaaacatccactctgcggcggtcaggtcttctgctgtcccccacttgctgccgctctgaattgcagcatccggtttcaccacagaaaggtcgttttctggctggtcagaggattcgccagaattctctgacgaataatcttttcttttttcttttgtaatagtgtcttttgtgtccccctgttttgagggatagcaatcccccaatttgagggatgttttatccctcgttttaggggattttccctcgttttgagggatgcaccattctgagatgtttttatttggtccaaacatgccgccttgctgcttgataatattcattctgacgagttctaacttggcttcattgcaccgtttgacaggtaactttgtaatctcgctaagttgagaatcggtgattctgtccattggtttattccacccataggttttacgcagaatggcaagcagcactttaaactgtcgcttggtcagatctgcgcccgaataagcctcaagcagcatatttgatagtctggcgtaaccatcatcgagatctgccacattacgctcctgtccggcaaagttacctctgctgatctgcgacttatcaacgcccacagcttccgctgtcttctcagttccaagcattgcgattttgttaagcaacgcactctcgattcgtagagcctcgttgcgtttgtttgcacgaaccatatgtaagtatttc

SEQ ID NO: 593 - DNA, 2193 bp, Homo sapiens
atgcctgaacctccccccgccccaggctcctgcgcagcccgagcctccaagacgagcgccgctcctggctccacggcgcccagtcccatccaccgttcaagggctgaggagcgtgggaccacggcgcggaactggcaggcagctccaactgcagccccggtgcgggatccactgggtgaagccagctgggctcctgagtctgctaatctagtgggaatctggagaacttttgtgtctagctcagggattgtaaatgcaccaatcagcaccctgtcaaaacggaccaatcagctctctgtaaaacagaccaatcggctctctgtaaaatggaccaatcagcaggatgtggcccgtggctcggcgacttacagggagggagaacatggctgctggcttttagcacctggtgggtttcgcgccttgcaactcgacaactgccgggacggagtctgcgtgcgcgaccccctgcggcaggtgctgggcgaggcgcctcccctgcaactagcctgccgcttccctcccggcacccccgccgccagccccgagcgcggacctggagcggagaagagagtgtgcggaaaggatgtatcagaagtaacccactgcacacatgatctcttacatgctacattagaagactcctgggatgttagcagccagttagacaggcaacaggaaaactggaagagacatctgggatcagaggcatccacccagaagaaaataattacaccacaagaaaattttgagcaaaataaatttggtgaaaattctagattgaacaccaatttggttacacaactgaacattcctgcaagaataaggcctagtgaatgtgagacccttggaagcaatttgggacataatgcagacttacttaatgagaataatattcttgcaaaaaagaaaccctataagtgtgataaatgtagaaaagcctttattcatagatcatcgcttactaaacatgagaaaacacataaaggagagggagctttccctaatggaacagatcaaggaatttatcctggaaagaaacaccatgaatgtaccgactgtgggaaaacctttctctggaagacacagcttactgagcatcagagaattcacactggggagaaaccctttgaatgcaatgtatgtggaaaggccttcaggcatagctcatctcttggtcagcatgagaatgctcataccggagagaaaccctatcagtgtagtctctgtgggaaagccttccagcgcagctcctcccttgttcaacaccagcgaattcacactggagagaaaccctatcgatgtaatctatgtgggaggtcctttaggcatggcacatccctcactcaacacgaggtcacacacagtggagagaagcccttccagtgtaaggaatgtgggaaagcctttagtcgatgttcttcccttgtccaacatgagaggactcatactggagagaaaccttttgaatgtagcatatgtgggagggcttttggtcagagcccatccctttataaacatatgaggattcataagagaggcaaaccttaccaaagcagtaactacagcatagatttcaagcacagcacatctctcactcaagatgaaagcactcttaccgaagtgaaatcctaccattgtaatgactgtggggaagactttagtcacattacagactttactgaccatcagaggatccatactgcagagaacccctatgattgtgagcaggcttttagtcagcaagctatttctcatcctggagagaaaccctatcaatgtaatgtatgtgggaaagctttcaaaaggagtacaagtttcatagagcatcacagaattcatactggagagaaaccctatgaatgtaatgagtgtggagaagcctttagtcgacgctcatcgcttactcaacatgagagaacccacactggagagaaaccctatgaatgtattgactgtgggaaagcctttagtcaaagttcatctctcattcagcatgagagaactcatactggagagaagccctatgaatgtaatgaatgtgggagagccttccgaaaaaaaaccaacctgcatgatcatcagagaattcatactggagaaaaaccctattcttgtaaggaatgtgggaaaaacttcagccgaagttcagctcttactaaacaccagagaattcatactcgaaataaactctag

SEQ ID NO: 594 - DNA, 834 bp, Homo sapiens
atgcctatcttgttcaccactgtatcctcagcacttagtggggcccagcatatagcagatgctcagtgtgacagaaaagggcaccgcactacaattcaggggtcaagggtcaacctggtccagccctctgtgggtcccaaggtggaggagacgcagtgctggggtccaggccgagggatgcctggcgcgccggaagcacctagagagcggcgcgtgcgcagcgggagtcgaagcggagatcccggggtcgcgcgagagccgcaagcggagttggtgggcgctatgctatcacccgaggcagagcgagtgctgcggtaccttgtagaagtggaggagctcgccgaggaggtgctggcggacaagcggcagattgtggacctggacactaaaaggaatcagaatcgagagggcctgagggccctgcagaaggatctcagcctctctgatgaggaaaacaacgtaaaatgcgtaattgaaaattgtaagaaagccagagatggaattggacttggggtgggtgttgagaatatatatccagaagaatgggacactttagatgaggccaagtggctgtggcagtggaagcaaatggggaaagatgtgatggtttgcttcgggaacatgtttatcaagatgcctcaccctgagacaaaggaaatgattgaaaaagatcaagatcatctggataaagaaatagaaaaactgcggaagcaacttaaagtgaaggtcaaccgcctttttgaggcccaaggcaaaccggagctgaagggttttaacttgaaccccctcaaccaggatgagcttaaagctctcaaggtcatcttgaaaggatga

SEQ ID NO: 595 - DNA, 506 bp, Homo sapiens
ctgaaagacgtcattactctacggaggcatgtggaaacaaaagttagagctaaaatccgtaagaggaaggtgacaacgaaaatcaaccgtcatgacaaaatcaatggaaagaggaagaccgccagaaaacagaaaatgtttcaacgtgcgcaagagttgcggcggcgggcagaggactaccacaaatgcaaaatccccccttctgcaagaaagcctctttgcaactgggtaagtttgtttgttttccttgcttttgaacatagtctgccaggtcaggacatggatacatttttctccctacagctctgtgctcaagccctgcagagggagatggcagagaggaaggctgcctacagcatcacagtcccatccctgttggtaaccgtgttgtgcaaaaacaccttcatccccacccagtgggcccctgatctaaattcaaagtgtcagaggttccatatttgtaatagcaaatgggccctgactgtaaattagtgaagagtgaatgt

SEQ ID NO: 596 - DNA, 506 bp, Homo sapiens; identical to SEQ ID NO: 595

SEQ ID NO: 597 - DNA, 506 bp, Homo sapiens; identical to SEQ ID NO: 595

SEQ ID NO: 598 - DNA, 506 bp, Homo sapiens; identical to SEQ ID NO: 595

SEQ ID NO: 599 - DNA, 3859 bp, Homo sapiens
atggtgggagaactccgctacagggaattcagggtgcccctggggcccggcttacatgcctatcctgatgagctgatccgccagcgcgtgggccatgatgggcatcctgagtaccagatccgttggctcatcctgcggcgtggcgatgagggggacgggggctctggccaagtggactgcaaggctgagcacatcctgctgtggatgtccaaggatgagatctatgccaactgccacaagatgctgggcgaggatggccaggtcatcgggccctcccaggagtctgcaggggaggttggggccctggacaaatctgtgctggaggagatggaaaccgacgtgaagtccctcattcagagagcccttcggcagctggaggagtgtgtgggcactatccctcctgctcctctacttcacactgtccacgtgctcagcgcctatgccagcattgagcccctcactggagtattcaaggacccaagggtcctggacttgctcatgcacatgttgagtagtcctgattatcagattcgctggagtgcaggccggatgatacaagccctgtcctcccatgacgctgggacccggactcagatccttctgtcactgagccaacaagaagccattgagaaacacctggattttgacagccgctgtgctctgctagcactgtttgcacaggccacgctctctgaacaccccatgtctttcgagggcattcagctaccacaggtcccaggaagggtgctcttctccctggtgaagcggtatttgcatgtcacctcgctcctggatcagctgaacgacagtgctgcggagccaggagcccagaacacctctgctcctgaggagttgagtggggagaggggtcaactggagctggagttcagtatggccatgggcaccctgatctcggagctggtgcaagccatgcgctgggaccaggcctcagacagaccaaggagctcagcacggtcccccggttccatcttccagcctcagctggcagatgtgagcccagggctccccgctgcccaggctcagccctccttcaggaggtcaagacgttttcgccctcgttctgagttcgcaagtggcaatacctatgctttgtatgtgcgggacacactgcagccggggatgcgagtgcggatgctggatgattatgaggagatcagtgccggggatgagggcgagtttcggcagagcaacaacggtgtgcctcctgtgcaggtattttgggagtcaacaggccgcacctattgggtgcactggcacatgctggagatcttgggctttgaggaagacattgaggacatggttgaggctgatgagtaccaaggggcagtggccagtagagtcctgggtagagccctgcctgcctggcgctggaggcccatgacagaactctatgctgtgccttatgtgctgcctgaggatgaggacactgaggagtgtgaacacctgaccctggctgagtggtgggaactcctcttcttcatcaagaagctggatggacctgaccatcaggaggttctccagatcctccaggagaacctagatggggagattctggatgatgagatcctagctgaactggccgtgcccatagaattggcccaggacttgttgctgactctgccacagcgactcaatgacagtgccctcagggacctgatcaactgccatgtctacaagaagtatgggcctgaagccctagcagggaaccaagcctacccatcccttctagaagcccaagaagatgtcctcctgctagacgcgcaggcccaggctaaggactcagaagatgcagccaaagtggaagcaaaagaacccccatctcagagtcccaacactcccctgcagcgtctggtggagggttatggtccagctgggaaaatcctcctggatctagagcaagccctcagctcagaggggacccaggagaacaaggtcaagccactcctgctgcagctgcagcggcagccgcagcccttcctggcactgatgcagagcctggacactccggagactaacaggaccctgcacctgactgtgctgagaatcctgaagcagctggtggacttccccgaggcactgctgctcccctggcacgaggccgtggatgcctgcatggcctgcctgcggtccccaaacactgatcgagagcacccagtacacagagtacacagtggtacctgctactgcagtgcccctgtggccttcgccctgtttcattcatctcctcccttatgtccccacccaggtgctccaggaactgatttcttcctgcaccgcctgacctcagtgagcagggactatgccgtggtgctgaatcagctgggagcaagagacgctatctccaaggccctggaaaagcacctgggaaagctggagctggctcaggagctgcgggacatggtgttcaagtgtgagaagcatgcccacctctaccgcaaactcatcaccaacatcctgggaggctgcatccagatggtgctgggccagatcgaagaccacagacgaacccaccaacccatcaacatccctttctttgatgtgttcctcagatacctgtgccagggctccagtgtggaagtgaaggaggacaagtgctgggagaaggtggaggtgtcctccaacccgcaccgggccagcaagctgacggaccacaaccccaagacctattgggagtccaacggcagcgccggctcccactacatcaccctgcacatgcgccggggcatcctcatcaggcaactgactctgcttgtggctagtgaggactcgagttacatgccggcccgagtggtggtgtgcgggggtgatagcactagctctcttcacacggaactcaactcggtgaatgtgatgccctctgccagccgggtgatcctcctggagaacctgacccgcttctggcccatcatccagatccgcataaagcgctgccagcagggtggcattgatacgcgcattcgggggttagagatcctaggccccaagcccacgttctggccagtgttccgggagcagctctgtcgtcacacacgcctcttctacatggttcgggcacaggcctggagccaggacatggcagaggaccgcaggagcctcctgcacctgagttctagactcaacggtgctctgcgccaggagcagaattttgctgaccgcttcctccctgatgacgaggctgcccaagctctgggcaagacctgctgggaggccctggtcagccccgtggtgcagaacatcacctcccctgatgaggatggcattagccccctgggttggctgctggaccagtacctggagtgtcaggaagctgtcttcaacccccagagccgcggcccagctttcttctcgcgggtgcgccgtctcactcacctgctggtgcatgtcgagccctgtgaggcaccccctcctgtggtggccactcctcggcccaaaggcagaaacagaagccacgactggagctccttggctacccggggccttccaagcagcatcatgagaaacctgacgcgctgttggcgggccgtggtggagaagcaggtgaacaattttctgacctcatcctggcgggatgatgactttgtgccacgctactgtgagcactttaatattctgcagaactcaagctctgaactgtttgggcctcgggcagccttcttgctggcgctgcaaaatggctgtgcgggagccttgctgaagctcccttttctcaaagctgcccacgagcagcaagaaatggcacagcaggaacgaaagcaacagcaggagctgcacctggccctgaagcaagaacgtcgggctcaggcccagcagggccatcggccatacttcctgaaaaaat

SEQ ID NO: 600 - DNA, 348 bp, Homo sapiens
ctaatcaagctgaacactagttgctaggttccacggttctcttccgtgacccacggcttctaatagagctataacactcaccgcatggcccaagatttcattccttggaatctctttcacttctttttctgttgataaacccgtttggcttccagcttctccagcacctgtgtaaacaattcctgtacccaaattgaatttcttctcttgtaaatacttaaagtggtttctgatttctttgctagatcctggaagaacactttccactttcaaattcttcataagggccttagtcttcaccacgggctggaagacgcgtatgatgtggccagtcgcggatccttccat

SEQ ID NO: 601 - DNA, 2726 bp, Homo sapiens
atggcaagagacttctggggccccagtggctggactatgactgtgaccgagctgtgatcgaggactgggtgttcagggtcccccatgtggccatattcctgagtgtggtcatttgcaagggctttctcgtcctgtgctcgtctcttgatctgactaccctggtccctgagcgtcaagtggaccagggcaggggttttgagagcatcctggatgtcctctctgtcatgtacatcaacgcccagctgcctcgggagcagcggcaccgctggcgcctgctcttttcgtctgagctccatggacacagcttctcccagctctgtggccacatcactcaccgggggccctgtgtggctgtcctcgaggaccatgacaagcatgtgttcggtgggtttgcctcttgctcttgggaggtgaagcctcagtttcaaggggacaatagatgcttcctgttctccatctgccccagcatggctgtgtacacacacacgggctacaacgaccactacatgtacttgaaccatggacagcagacgatcccgaacggactgggtatgggggggcagcacaattactttgggctttgggtggatgttgattttgggaaaggacacagcagagccaagcccacgtgcaccacgtacaacagcccgcagctgtcggctcaggagaacttccagtttgataagatggaggtgtgggcggttggagacccctcagaggagcagttggccaagggcaacaagagcatcctggatgcggaccctgaggcccaggccctgctggagatcagtgggcattcgcgccacagcgaagggctccgggaagtcccggacgatgaatgaggagccgcctgagccttcctggagccaggacctggattcctctgggtagagggcaccgcctgcagcccctcttccctcccacatggtttaactgtaatagcgtaccgcacgggtcacagcctggtagtcccacatgtgccaagaagacgccctctgaagccatgtcctgactcatgggtggatctcccagaaatagatgttttttaagttttcttttttgccctacagggtcaccctcaggatctctccaagaaatcttgtgtcaaattagtaactcagtcttatactttgttcttttttaccaacgaaatcctaagcagctgagacctttcagacccccgcttggcattagggaattccgctggcattagggaattccgctggcattagggaattccgctggcattagggaattccgctgggcattagggaattccgctggcattagggaattccgctggcattagcattgctgggatctcaacttctctattgaggagggggttcctcccgctggggttcatatggcctcactcaggccatccctgttagaaggtggtacctgatggtctgttctgacgggtgagggacagaggcatctggatgaaaatctcgacgctttctgggaacagcttccaatggcatgggagttctgtatttaaaagcatgaactgtgtataaaatggggaaatggaggcaggagactttgaggtaacatggtctggtggtggcatgagtcctccagaaggtatttgtaataaggttccacaccccagctctctcagctgtttttaaatgaatgtgtgtgaggaacagatgggaaagttgggagatctgtctacagagaagcaaagttgtggttctcttgctaacttcaaggtgagggatattggggcaccctaagtttggggaacttggttggataaatacgtatatggtccattccataaatcagtggtgagtgactgggccggggttctagacctctgggaaccagcacctgagtcacagctgtctaggcctcggtgctggcctgggttctagatctcttgggaacccagtgcctgagtccaccagctgtccagtgcagccattttgcccagggctgcttcccgagggggatgatgggaaattcagcagtgtagactcactttaaacaagctccggtgatcctgaaattgctgaagatcgtgtaggtgggttgtgggggtcagcagagctgccattcttgcccacgtcttggaaaacaacacacggtgagttcaccgtttgggccatgaagattttccccactttaaaggtgctgtgaacttgtctcctaaagatatatacctcttccttttgtcttttgctgtaagctttggaccttttgcagatctggatgaaaatacaaccctcttattgtataggttggcccttggattatagcccattagtaaatcggagctgttcggcatttttgccaggcccttgcattttcctacctgggaggttccatcaaacccttcccacttaagcaatagcccctgacctccaggcagaatgccctcataaattagcccttccgtaagaaaagtgcacgcctcagacagttgtgtggaggggcaggagcgtgatgcagacaaggacttagtcatgactgattttccttagcccagtttgtaatggcttatggggaacattgtgagcttcctacctgacatgttggcagaagtagaatattaggatcctcaagcatctctaccgtaagtccaaagaatttaggtccctattgtcactttgttttgcaatgttttttataaaaatgcaattaaatacctcactattaaactgccatgatgcctcagttaaaaaaaaaaattaaatgtccgtcagtgtctgaaa

SEQ ID NO: 602 - DNA, 394 bp, Homo sapiens
cagtatggactgtacaatggtggtggtgccattatggccgccttgcatgagagctttacatcgtgtctgaattatggcggccctcaaaagttctccccagaaggtgacctatgttctagcccagaccccaaaatctgttatgtgtgcaagaagagtttcaaaagctcctacagtgtgaaacttcactacaggaacgttcacttgaaagagatgcacgtctgcacagtggctggttgcaatgctgcattcccctctcgccgaagccgagacagcaaaagattagaaagctgatcttattgtcacaagacacagtgccaacataaacctacatcgtaaactgttgaccaaagaactcgatgacatgggcctggactcgtcgcagccctcccttagc

SEQ ID NO: 603 - DNA, 411 bp, Homo sapiens
gcctatggcccagccgtcccaccacagaccctctacaaccccgcccagcagatcctggcctacgcaggcttccgcctgacgcccgagcccgtcccgacctgctcgtcctaccctctgccccttcagccctgcagcccgcttcccagttgcgccctcctctgccctggcttcgtctgaggacctgcagcccccttctccaagcagctctggctctgggcttcccggccaggctccaccgtgctacgcacccacctactttcccccgggggaagaaccacccccctacgcaccctgatagaggcgaggacgaatagataaccttgctcggtattcttcttacctcataaggggatctctttcacaaccccttctctcgtcccctaactccgtgtccataccattagcaactcg

SEQ ID NO: 604 - DNA, 330 bp, Homo sapiens
ggcacgaggtccggttctttgtggtggattgccgtcctgcagaacaatatggtgctgggcatttatcaactgctttccacttagattcagacctgatgcttcagaatccatctgagtttgcacagtcagtaaaatccttgctggaagcacagaagcagtccattgagtctggctccatagctggtggggagcacctctgttttatgggcagtggcagggaggaagaagacatgtatatgaacatggtcctggcacactttttacagaaaaacacagaatatgtgagtattgccagtggaggatttatggcactgcagcagcacctggcag

SEQ ID NO: 605 - DNA, 468 bp, Homo sapiens
gacggtgctatgtgctacaggaggtggtgcttacaagtttgaaaaagattttcgcacaattggaaacctccacctgcacaaactggatgaacttgactgccttgtaaagggcttgctgtatatagactctgtcagtttcaatggacaagccgagtgctattattttgctaatgcctcagaacctgagcgatgccaaaagatgccttttaacctggatgatccctatccactgcttgtagtgaacattggctcaggagtcagtattttagcagtccattccaaagacaactataaacgagtgactgggacaagccttggagggggtacctttctgggtttatgcagtttattgactggctgtgaaagttttgaagaggctcttgaaatggcatccaaaggtgatagcacacaagctgacaagctggtccgtgatatttatggaggagattatgaaagatttggtttgcc

SEQ ID NO: 606 - DNA, 374 bp, Homo sapiens
cttggtatgtggtgcccccagaacatggtcagcgcctggatcgcctggccagggagctcttcccaggcagttcccggtgttgtggggccttcctgcggcacaaggtggccctcatctcgcctacagttctcaaggaaaatgggattcccttcaatcgcataactcaggaggctggagagttcatggagacctttccctatggctaccatgctggcttcaaccatggtttcaactgcgcagaggccatcaattttgccactccgcgatggattgattatggcaaaatggcctcccagtgtatctgtgggaaggcaagggtgaccttttccatggatgccttcgtgcgcatcctgcaacctgaacgctatgacctg

SEQ ID NO: 607 - DNA, 470 bp, Homo sapiens
  misc_feature (1)...(470): n = a,t,c or g
ttgcggaggaattcctatcattcagagatactggccatcaatcaagtgtttgatatcctgtccacttacttatagactcacaactggcctgaagcattgaagaaaggagtttcttcaggaaaaggctatattcttcggaactcagtggaatgatgggcctaagattgcagctgcgnnnnnnnnnnnnnnnnnnnnnnnnnnnnnnnnnnnnnnnnnnnnnnnnnnnnnnnnnnnnnnnnnnnnnnnnnnnnnnnnnnnnnnnnnnnnnnnnnnnnnnnnnnnnnnnnnnnnnnnnnnnnnnnnnnnnnnnnnnnnnnnnnnnnnnnnnnnnnnnnnnnnnnnnnnnnnnnnnnnnnnnnnnnnnnnnnnnnnnnnnnnnnnnnnnnnnnnnnnnnnnnnnnnnnnnnnnnnnnnnnnnnnnnnnnnnnnnnnnnnnnnnnnnnnnnnnnnnnnnnnnnnnnnnntaaaaa

SEQ ID NO: 608 - DNA, 397 bp, Homo sapiens
cgtcgcgggagccgctcacagctacggtgtcactcagccaggcgactgcgaaagatccaatccttgtggccaatgcggtcgccccaggcaacagggggtcccaggtgggcagctggtaagatggcccaggctgttggggttttcgccgccggtggccagaagcgtcttggagggattcagctcgatggcatggatgccgcagccctggtgggcctgggccagcccggcctccttgtcccgcatgagggggatgcgcgtgatgtggcctgactgcacgtccaccacaaacagcgtattacacttggtgccgcacaccacctgcctggcgttcagccactgtgacgcgaacaccttgttgagggtgcccaggtccagctggcgctccgtcagcagctcg

SEQ ID NO: 609 - DNA, 404 bp, Homo sapiens
  misc_feature (1)...(404): n = a,t,c or g
aagggcccgacgcgggctggggagaccgcattcccttggaaatcctggtgcagattttcgggttgttggtggcggctgacggccccatgcccttcctgggcagggctgcgcgcgtgtgccgccgctggcaggaggccgcttcccaacccgcgctctggcacaccgtgaccctgtcgtccccgctggtcggccggcctgccaagggcggngtcaaggcggagaagaagctccttgcttccctggagtggcttatgcccaatcggttttcacagctccagaggctgaccctcatccactggaagtctcagctggtaggtgagtgctgtcctcggctcactttcctcaagctctccggctgccacggtgtgactgctgacgctctggtcatgctagccaaagcctgc

SEQ ID NO: 610 - DNA, 1557 bp, Homo sapiens
tcagtcatctttgtcttttactccatgtttcaggatgcttgtgaactcgatgtaattgaaatttccctttttgtcaataggtgcttctctgtgcagctcatccacttcctcatctgtaaactgatcccccatggttgtcatcagctctctcaggtaatcttcctgaatggtgcctgttgcttcttcatcaaagcaagcagaagcatttctgatgacatcttcaggatctgtgccatttaacttctcaccaaacatagtgaaattaatgggccctggtgcctcattcatcgtggcatcaaggtatgcatcagtgggattcttccccaaaaagaaaggatgaacaacatctgctgtatctttttctagtttcaggagttcaatttccaggtttttctggtagatttcagcttgaatatttgtgatctgctgtagtctggtgaagttcacaaaacaagaaactgttttcttagacatgtttaacatctcctgcggagccttacggcagctgagcggtgggaggcgagtccggggctccctgatcttccgtaggctcccagaggcgcctggcctccgcagagctgcaaaggcggcagggcttggtggtcgggctgtgtgttcttccgattcttccttgtcgctcttgggtcgggccccaggagccagggatcggcgggagttgagagctggggcaggagccccagccgggaggccgaccgggtggactgggcggtgacagcagcgcttccttcccgcagggacctgagccgcggcgctaggatgggaaacagtgcgctccgcgctcatgtggaaacggcgcagaaaactggtgtctttcagcttaaggaccgagggctgaccgaggtgagacttgtctgtgattcgttttatttgtggattttgagcatcaatctcattgcctatgttcagggccatgtcttttagatttcccaggatactgcccacttgagtcaggttctcttccatttcatcttctctggcatcattagttatgcgtttaatgtatccaccactggctgctcccgttgttggttgctgaagctgaccatttgtcaccgggcctggctgtttagatactacattgcaaggtgagttttctccaccatctccccatgttgtcttataagccttgccagactcaaagttctttgttctattacatgggcagacacaaaggccacagcatttgttgagttctgttaaagtcttctctgtctctctcatgtccttatttatttggtccaagccttcttctatgcggtttagttgttccttttgttcatccagcatagtgatggtcttgattcctgcatcctgagaggtcaatgacacagataaactctggttcttattacagatttgaccccaggaatctggcaatgtctggagttgcttgattgtcacaacttgggccaggtgatggggctggttaatggcatttttaagttcagcattctctttggcttgatagaagtctacgtccatggtaaccaatgcatccgcagcaagaggaaacttctgtttatagcaggatagcat

SEQ ID NO: 611 - DNA, 426 bp, Homo sapiens
caatctgaccggtacactgtctaaccgcactccgcctgtgccaccgtaatctgccgtgtacctgtctaaccccacaccgcatgtgccaccgtaatctgaccggtacctgtctaacccctcgccgcctgtgccaccgtaatctaaccggtacctgtctaaccccacgacgcctgtgccacggtaatctgaccggtacatgtataacaacacgccgcctgtgccaccgtaatctgaacggtacctgtctaaccccacgccgcctgtaccaccgtaatatgaccggtacctgtctaaccgcacgccgcatgtgtcaccgtagtatgaccggtacctgtctaaccccacgccgcctgtgtcaccgtaggacagagcacaaaggagcacccaggatgcacacctgacacacttcgcggccgagccgcaagc

SEQ ID NO: 612 - DNA, 459 bp, Homo sapiens
ggtaaattacaacctcctcaagtatatttgcagattcttggatgaagtacagtcctactcgggagttaacaaaatgagtgtgcagaacttggcaacggtctttggtcctaatatcctgcgccccaaagtggaagatcctttgactatcatggagggcactgtggtggtccagcagttgatgtcagtgatgattagcaaacatgattgcctctttcccaaagatgcagaactacaaagcaagccccaagatggagtgagcaacaacaatgaaattcagaagaaagccaccatggggcagttacagaacaaggagaacaataacaccaaggacagccctagtaggcagtgctcctgggacaagtctgagtcaccccagagaaacagcatgaacaatggatcccccacagctctatcaggcagcaaaaccaacagcccaaagaacagtggtcacaagctata

SEQ ID NO: 613 - DNA, 1460 bp, Homo sapiens
atgaaagagaatttcaaacacaggcacgtggtggcgttcattagcagtcaggaagctcaggaagattcaagagaggaagaagaccgactggagtctcggttttactttctttttctcttggagctgagctataagacaacaggactgaacagggagccaactgtttctttgaacagtaaatcaggaacaccaatggaccaaaatgaacacagtcactggggaccacatgcaaagggccaatgtgccagcagatctgagctgagaatcatcctggtgggcaaaacaggaactggcaaaagtgctgcagggaacagcatcctcaggaagcaagcatttgaatcgaagctgggttcccagaccttgactaagacttgcagcaaaagtcagggaagctggggaaatagagagattgtcattattgacacaccagatatgttttcttggaaggaccactgtgaagctctgtacaagagaggtgcagaggtgctacttggtggctggaccaagaaccccatgtgctgctcctggtgactcagctgggccgctatacctcacaggaccagcaggctgcacagagggtgaaggagatctttggagaggatgccatgggacacacaattgtcctctttacccacaaggaagacctcaatggtggctccctgatggattacatgcacgactcagataacaaagccctaagcaagctggtggcagcatgtggtgggcgaatctgtgcctttaataaccgtgctgaagggagcaatcacgatgaccaagtgaaggaactaatggactgtattgaggatctgttgatggagaaaaatggtgatcactataccaatgggttgtacagcctaatacagaggtctaaatgtggacctgtgggatcagatgaaagagtaaaggaattcaaacagagccttataaagtacatggaaactcaaagaagttacacagccttggctgaagcaaactgcctaaaaggagccttaatcaaaacacaactaccaaaagtagataaaaccacaaagatagggaaaaaacagagcagaaaaactggaaactctaaaaagcagagcacctctcctcctccaaaggaacgcagttcctcaccagcaatggaacaaagctggacagagaatgactttgacgagctgagagaagaaggcttcagacgatcacattactctgagctaccggaggacattcaaaccgaaggcagagaagttgaaaactttgaaaaaagtttagaagaatgtataactagaataacccacacagagaagtgcttaaaggagctgatggagctgaaaaccaaggctcgagaactacgtgaagaatgcagaagcctcaggagccaatgcgatcaactggaagaaagggtgtcagcaatggaagatgaaatgaatgaaatgaagcgagaagggaagtttaaagaaaaaaagaataaaaagaaatga

SEQ ID NO: 614 - DNA, 1157 bp, Homo sapiens
gcgccgccggtgccggcgaacgcgctgggcgcgcggggcgaggcggtgcggctgcagctgcagggcgaggagctgcggctgcaggagagagagcgtgcgactgcaccagattaacatctacctcagcgaccgcatctcactgcaccgccgcctgcccgtgcgctggaacccgctgtgcaaagagaagaaatatgattatgataatttgcccaggacatctgttatcatagcattttataatgaagcctggtcaactctccttcggacagtttacagtgtccttgagacatccccggatatcctgctagaagaagtgatccttgtagatgactacagtgatagagagcacctgaaggagcgcttggccaatgagctttcgggactgcccaaggtgcgcctgatccgcgccaacaagagagagggccctggtgcgagcccggctgctgggggcgtctgcggcgaggggcgatgttctgaccttcctggactgtcactgtgagtgccacgaagggtggctggagccgctgctgcagaggatccatgaagaggagtcggcagtggtgtgcccggtgactgatgtgatcgactggaacaccttcgaatacctggggaactccggggagccccagatcggcggtttcgactggaggctggtgttcacgctggcacacagttcctgagagggagaggatacggatgcaatcccccgtcgatgtcatcaggtctccaacaatggctggtgggctgtttgctgtgagtaagaaatattttgaatatctggggtcttatgatacaggaatggaagtttggggaggagaaaacctcgaattttcctttaggatctggcagtgtggtggggttctggaaacacacccatgttcccatgttggccatgttttccccaagcaagctccctactcccgcaacaaggctctggccaacagtgttcgtgcagctgaagtatggatggatgaatttaaagagctctactaccatcgcaacccccgtgcccgcttggaaccttttggggatgtgacagagaggaagcagctccgggacaagctccagtgtaaagacttcaagtggttcttggagactgtgtatccagaactgcatgtgcctgaggacaggcctggcttcttcgggatgctccagaa

SEQ ID NO: 615 - DNA, 488 bp, Homo sapiens
ggcggggcccaggactgctgctgctgaccgccttgataggctacaccgtgaagaatgcgtggaagaacaacgtcttcttctcttggtcctatttttctgggtggctggccttacccttctcaattctcgcgggtaaactggacagcgggaagagggtggaggagactgcccagaagaccctcaccccagaggctccccagctgccctcccaggaaaccccggggacctctcggggactccccaacacactaacgactcccgcagacccggcaaagacccccttggagccccaaaccccagtccccggggccctcccggccatccgccccagggcccaccttcctttccctggtccgcacccccgtccccccaggcttctgctttctgctggcagacatgatcatgcagagcggcgacgccatcagtggattccccgtgtgtctgtgactgcagcctgcctggggcagaataaaggaacggcttttttt

SEQ ID NO: 616 - DNA, 1778 bp, Homo sapiens
atgccagtgttgcctgtaactgcaactgaaatccgccagtatttgcgggggcatgggatccccttccaggatggtcacagttgcctgcgggcactgagcccctttgcagagtcttcacagctcaaaggccagactggtgttaccacttccttcagcctcttcattgacaagaccacaggccactttctctgcatgaccagcctagcagaagggagctgggaagacttccaggccagcgtggaggggcgaggggatggggccagggaggggtttctgcttagcaaggcaccagaatttgaggacagcgaggaggtccggaggatctggaaccgagcaatacctctctgggagctgcctgatcaggaggaggttcagctggctgatacaatgtttggccttaccaaggttacagatgacacactcaagcgtttcagtgtgcgatatctgcgacctgctcgcagtcttgtcttcccttggttctcccctgggggctcaggattacgaggcctgaagctcctagaggctaaatgccagggggatggagtgagctacgaggaaaccactattccccgacccagcgcctaccacaatctgtttggattaccactgattagtcgtcgagatgctgaggtggtactgacgagtcgtgagcttgacagcctggccttgaaccagtccacggggctgcctacccttactctaccccgaggaacgacctgcttaccccctgccttactcccttacctggaacagttccggcggattgtattctggttgggggatgaccttcggtcctgggaagccgccaagttgtttgcacgaaaactgaaccccaaacgatgcttcttggtgcgaccaggagaccagcaaccccgtcccctggaggccctgaacggaggcttcaatctttctcgtattcttcgtaccgccctgcctgcctggcacaagtccatcgtatctttccggcagcttcgggaggaggtgctaggagaactgtcaaatgtggagcaagcagctggcctccgctggagccgctttccagacctcaatcgtatcttgaagggacatcgaaagggcgagctgacggtcttcacagggccaacaggcagtggaaagacgacattcatcagtgagtatgccctggatttgtgttcccagggggtgaacacactgtggggtagcttcgagatcagcaatgtgagactagcccgggtcatgctgacacagtttgccgaggggcggctggaagatcaactggacaaatatgatcactgggctgaccgctttgaggacctgcccctctatttcatgactttccatggacagcaaaagcatcaggactgtaataggtacaatgcaaccatgcagtctacgtctatgacatttgtcatgtgatcatcgacaacctgcagttcatgatgggtcacgagcagctgtccacagacaggatcgcagctcaagactacatcatcggggtctttcggaagtttgcaacagacaataactgccatgtgacactggtcattcacccccggaaagaggatgatgacaaggaactgcagacagcgtccatttttggctcagccaaaggaggggagtggtctgccccgcactccaccagcagccgacccagtgcccagcctaagagtgactcgacggtggccgaggctgcccctctggcctctgacttcacagcttactggatttggtttttgacctggggaagggggcgagcatcacgtgaccgagaattcggctacctggctgccttaaactaa

SEQ ID NO: 617 - DNA, 459 bp, Homo sapiens
cagcagatcgtccgtggcatgaaccaggtgctggatgtgccgctgactgtgaagatccgcacaggcgtccaggagcgtgtgaacctggcgcaccgcctgctgcccgagctgcgggactggggcgtggcactcgtcacggaaatggggacatcttgtcatttgaggatgccaaccgcgccatgcagactggtgtcaccgggatcatgattgcccgtggcgccctgctcaagccgtggctcttcacggagatcaaggagcagcggcactgggacatctcgtcgtccgagcgcctggacatcctgcgggacttcaccaactacggcctggagcactggggctcggacacgcagggcgtggagaagacccggcgctttctgctcgagtggctgtccttcctgtgccggtacgtgcccgtggggctgctggagcggctcccacagaggatcaacgagcggccgc

SEQ ID NO: 618 - DNA, 567 bp, Homo sapiens
  misc_feature (1)...(567): n = a,t,c or g
gcctgcatgtcgcagcagcgtactgacgtcacgcaggacgccactgccctgtcgccccgcctgtgcagcccaggacctaggcgcggtagctggggctggcttttgaggggcgcgggcagccttctgactgggtcggaggcctgcgggcccgaagcctctgtccctcctgttcttgtccggcgctgcttagccccctcngcgtagtcatcatggatctgattttaaaccggaatggattatctgcaggtgggagtaacatctcagaagactatgaagcttaattcctgcctcaagacacagagctacacaaaaggtggttattggagatcatgatggggtagttatgtgctttggcatgaagaaaggagaagcagcagcagtgttcaagactttacccgggccgaagattgcaaggctggaactgggaggggttatcaacacacctcaggagaaaatttttattgctgcagcatctgagattagaggcttcacaaaaaagaggaaaacagttcctctcctttgaaacaaacctcactgaaagcattaaagctatgtatgtcaaatgtt

SEQ ID NO: 619 - DNA, 505 bp, Homo sapiens
  misc_feature (1)...(505): n = a,t,c or g
tgggannnagagttgatncccttgncngttgagaaccgctcggccgacccacgcgtccggcagtagatcgcgatctagaactagtccggacgcgtgggaatgacttattttgagctatctttcttatactgggacctttctaatctcactacaatatgtaacattggtgttcgatctcaagtatttctgaatatattcccctatccacagaaatatactctgggggaaaaaaaatagaacaaattcttgccgtcctgaccattgaacaagagactaattagacaatggggctagaaaaacctcaaagtaaactggaaggaggcatgcatccccagctgataccttcggttattgctgtagttttcatcttacttctaggagtctgttttattgcaagttgtttggtgactcatcacaacttttcacgctgtaagagaggcacaggagtgcacaagttaaagcaccatgcaaagctcaaatgcatcaaagagaaatcagaactgag

SEQ ID NO: 620 - DNA, 563 bp, Homo sapiens
taagccccacccagccccccagtgcccgtcttcctgtcccatctgctcagagagaggtggggccgagacttgctggagagcttccctcctttcccatctggggagtccgcgggccacagtgggcaggtggcaccgggggtcagcatgcaggggcgccagaggcccaggctgctggccggacagtcaccctctgttctcgctacatcccttgccccctgtccatttatttaagcccccataggtgcccttcacccccaaaaccagctgtacagaatctttgatacagacctatttgctaggggtgctgccggggatttggggtcagcatctggccccctatctcctgaccagctgagtcatgaggccggtttctctctctctcccacttttgtcccccagccccgacctctcaggttagaccctgggccctggagcttagggattctccccaccccagccccacacctgctccttccctaatgctttgaggttttcttggttggaagctgcagctggcccaagaaagaaaataaaaaacaacacttttgcatgagaaaaaaaaa

SEQ ID NO: 621 - DNA, 971 bp, Homo sapiens
tttttttttttttttttgaagttccaacatgctttatttgaggacgagcgctcaacccgggatggagtaagaagtgggatgggagaagcgtagggttcaaattttctttgtgtctctgtgatccttaaagcatctcagcaagctgtagagatggtattaaggggagagaaaactttgagatgacaagaggaaacgttaataccattctcactccaatgaaacccatgaccacgtttttaaatgtcctacagagtcactgggtgagataagtaagatcactgtttcaatacacgatggggaaagataataaataaagaagtcttggttttcttcatttgcaggggaggattaccagggtaagaaatggggtaaaaatcggtaaataactatttactactgtctctggtgttttctcataatcaagccacataaatacctccctacttttccctcaactcccagaacaaagccaagactttggtaccaatttcttcgtgcttttcctcaagcaggtaactaggagtatccctactccagccttgtgcccctagaactgggctggagctcagagacttaccatgactcatggcagctgccttccccagctcagtgataaggtcgcccctgccaaacactggagaccaaagcccaggtccatcactcccatagtgactcctcccataagctctgcctcagctgtgaaaggcaagagggagaaggggagtgaggctcttgttcctcctcacctagtgggaagatatgcctcttcaaggtcccaccccagccagggaggagagggcaggcctcaggcagggtgtggacacagctggttgacactcagctcagctacagatcggctcagccacagttgggccggcctgaaccccaggtgcccaccagcagcaacttggcccccttgctctaccttctcaccattcgccagcagtgggtgcaggcagccatcatctttc

SEQ ID NO: 622 - DNA, 393 bp, Homo sapiens
tcaacttatgggagcagatctctgcagaataaaaatgaaaaagcatctgacgaccttcttggtgattttgtggctttatttttatagggggaatggcagataccaaccggagctcagtcctcagcccctgatcatcctggagggaaagaactgctctcttcggtgcatttataccgcgagccccttcaccagcttatggcggtataaccacgatactggaagaggccctgtttccctgacaatcatgactttcagtgagaacacaaagcctaacggaagatatactgcaactctggatgcggacaccaagcaaagctctctgcacataacagcctaccagctcatcgattcagcctcctacatctgtgtggtgagcgcactgtgctccacagg

SEQ ID NO: 623 - DNA, 2894 bp, Homo sapiens
tcagtacgcgtctgaccattgtgcatgccgcccacacttcggcgtagaataatgcacctggtgcttctcagtatcctcgttcatcaatgcttggatatgtacaagacattgcccaccggcatacttgtgctccactacaggcttggtttttaccggggacaaggagacgaggagaacagcggcggcaacggagggcacaggcgcgagcgacggagacagcgagggagaagtgacgacggcgcagacgcgcagacggaaatgtgcaaccagcatcgcagtgggaacgatgccctcattcagcatttgcatggtttgttgaaaaccggacatggcactccagtcgccttcccgttccgctatcggctgaatttgattgcgagtgagatatttatgccagccagccagacgcagacgcgccgagacagaacttaatgggcccgctaacagcgcgatttgctggtgacccaatgcgaccagatgctccacgcccagtcgcgtaccgtcttcatgggagaaaataatactgttgatgggtgtctggtcagagacatcaagaaataacgccggaacattagtgcaggcagcttccacagcaatggcatcctggtcatccagcggatagttaatgatcagcccactgacgcgttgcgcgagaagattgtgcaccgccgctttacaggcttcgacgccgcttcgttctaccatcgacaccaccacgctggcacccagttgatcggcgcgagatttaatcgccgcgacaatttgcgacggcgcgtgcagggccagactggaggtggcaacgccaatcagcaacgactgtttgcccgccagttgttgtgccacgcggttgggaatgtaattcagctccgccatcgccgcttccactttttcccgcgttttcgcagaaacgtggctggcctggttcaccacgcgggaaacggtctgataagagacaccggcatactccgttgtagcgccgggaagatgcttttcacgctggccctttgggggtttttttgccaaatggtcattgcaggcttcgccaatatacaccagattcagacagccaacgcggtcgcaggcacctttacagccgccatcgttgtcattccacagcactgttgatgcccgctcgctgaatgatatccgggcgacgccttcctggtgctgtgccagctcttctttgtagtgctcacgcggcatatccgagaacatgcacggtactgaaactgccgttgccgtgccgcaagatgcggtattagggaaatagaccacgttatctttcgccagccgcgggttagtttcacgcgggtagccgttgagggagaagttctccgcccgcgaggttgcgccgaccatcaggatggtcaaatttttacgttgttcgttctgcattaacgggttgcggtgcgcgtcttcaccaattcgcaccagcggcagatttgccagtcgctgatgggagtaccatgaccagctggcaacaatgctgttagaggggcttaaggatttcaccagctctttgttattgcggaacaacgaggcgtagtctttataaaacagtgcggcgaccagcaaaatcagtagtacagaaaccagaatattggctccacggaaaagaacactgcgcagacgcgaggtggcaggtttgatttgtatccagcaggcaatcagcgcagcaagcacgccgctgaatcccagcgttgatgacattggcggtgtcatcagcgcataactttctgccggagtggtatcaataatattggcaatcatcgagcggtcgatgacgatgccgtaagtcattatgaaatattggtgcagccgcgccagaataaacaggcaggccagtggtcgattaagccataagaaagagcttagtgtcaggacaatattaatcacgctgaaagcgacgaccggcatcgacaagaaaaccagtacgttatgcagcgaatccagcggcagcgcctgcaacaccttaaaaaccctgttatgattggtgctagcatcacagaagttgactgtagtacctgtcactgatacacggaaaaccaaactttggcggattatcggaatacctctgttacctgggtattcgctggtctgttctagagtgcctttgggctgcttttggcctggtttccgattttggctgcgaagcaggcgaaaacctgcagcaaactgggtctcggaagtctccatgggtgagtgtgaatggtccagcatacctgagtgactcagcagatcattctggaggtcctcgatcagagagaagggctctctgtcttcactgctgctttgtagtggaggaatttcattggctgagggtaaagttccatccaagaaagcttctagttggttctctaagctggcagataaactgcccataggttcggcaaggacgaaaatggccaaaacactgtccacggatgacaccccgtgaaacacatcattaggcccccgaagcacacgagtggaaagaagccgaacaagagggtgacccgaaagaatagcatctttatggacgaagtgtaaccaagaaagatagaagtcgaatttcaagaggaagtggtaattcgtggcatgatgccctggtccactagttgttctctcgtcctcctttgttgcagcctcagctggagcacccaaatagtaaatttttagagtcttgcctataattgcttctttaacactggagtccacaggaaggatgtttttctctaccagctccataggaccaggtctttgagcaatcttttcattcagatcatctgctagtcgagctcttttcaacttcatctgagtagcctgcagggatggctctgcaaatgtttgtggcatgatgccctggtccactagttgttctctcgtcctcctttgttgcagcctcagctggagca

SEQ ID NO: 624 - DNA, 1437 bp, Homo sapiens
caacaaatgtttacctgttgccttgtaattaactctactcaatttcaatagaatttccattatttaaaaaaagcctctaaaattaggaaagaattcccacatgtggtttttaatatatctcatgcttacttcgaaatataatctgcactagtctttgttaaagtctgagggagtcataaaataatgtccctctcctctcctgacctttgaaccacttgagacacagacagatggagattccaatattttaagtttactgctgaaaaaggcctaggttagaggatgtactttaagtttatgcccaacaatagcccaccagatattgaacttagaattagacagacctgcttactaaggcatgggcagttctgcacaagcacaaatctccctttgcagaggcaaagaactttcactgcaaggttcacaatgtagctggcaagagaccacaacatcggttctctgcagttacgacaaatccacaaaagggaaaaaagaggctagcatgcccagttctatatcttaaactccctcctatcctggtgaagtgagagaaagagattagaattcccttggtaaatggatagcctaagaagctctgtgagaggaagccatccttacccgccgctgccttctgaccaaagtagttcatatatagtgcacattagggcatgattcatgttacagtagctttagggccaaaacttcctcctcccgaagtaccccatatttaaattgccaagtgacctaaggtaaatgactttagggataacctcctttatttcattttatttctgttttataatttatatatttcaatatcttattattggtaagaaaaacttaactttctcagtcctaaaattctttattatcaaatacatcagtttaataataatctctaaggaagaaaaaaacacatttaagatatcccattggatttggaagataattattatggaactatggttccttatgtcaactcacatctcatttagatattaatacatgtatcatgaacatcatagctcagaattgctggtccagagtcactttagaatggctctgattcaaggaaattaaaagaaatgattgttaattttcttagtgctgggaaaggcagtgaaacaagcttttgaatcattatgtaattttcaaacaactaaaagggctatactgttcagttataatcttaaaaattctagctgagacagagcttttaaaaaatctttatagttttaccatacggcatcaattcaaaagattgtcatactgaaaccactgccataaaattttgtatgtaggccccagttgcagtagatctggctcctgtgagctataacttgcatggcttttcaatgtttatgtagtgtctgttaatatatttaagataaatactctataaccaaacagcctgttttctagagaatgatatatgat

SEQ ID NO: 625 - DNA, 868 bp, Homo sapiens
ccgacgcctcatcgtggtgctttcggacgccttcctgagccgggcctggtgcagccacagcttccggtgggtcccgcgcggggttgggtgggccccagcgtagcacccacccccctgacggtcccgccccgcagggagggcctgtgccggctgctggagctcacccgcagacccatcttcatcaccttcgagggccagaggcgcgaccccgccgacccggcggtccgcctgctgcgccacagcgcgccacctggtgaccttgctgctctggaggcccggctccgtgactccttcctccgatttttggaaagaagtgcagctggcgctgccgcggtaaggtgcagtacaggcctgtggaaggagacccccagacgcagctgcaggacgacaaggaccccatgctgattcttcgaggcccgagtccctgagggccgggccctgggacttcagaggtggacccggacccctgaaggcggacctgggtgtccgggggcctgtttttggagagccatcaagctccaccgcacaccagtggggtctcgctgggagagagccggagcagcgaagtggacgtctcggatctcggctcgcgaaactacagtgccccgcacagacttctacttgccttggtgtcaaaggatgaatatgtagctcccaccccagagtggcaggatcatagggacagcgggggccagggcagcggcgtcgctcctctgctcaacaggaccacaacccctgccagcagccctgggaccctgccagcagccctgggaccctgccagcagccctgggaaaaggctgtggcctcagggcgcctcccagtgccagaaaataaagtccttttggattctgaaaaaaaaaaaaaaaa

SEQ ID NO: 626 - DNA, 804 bp, Homo sapiens
cttgaaaatactttccaagatgaaaattcatcagggtgggtataattctgatgaaaacgcctgtgttcatcaacacagggtcagagcgctcaccgggtcgatgtgcaaatccaagccaggaagtcctgctccgggtggaaggtaaaaccttccctccagggaaccaggggctccggcgggcatcggaggcagcttcttggcctctgctgctgtgtcccccagtccgcccagcccgcattaatgtcctctggaataagagcctgtggctgaagcagagggccttctgggagagctctccaaggtctggaaggagggtcccccagaaagagctccggggtagccccactcgtggcccccctggactccaccagcttcatgcttctcagatgctatttattggccggcccggggagaccagggcagatttctcccgcaccaggctgtggaggtttggagggctgcctgagcagacactgtgccattgctggggctggggaaagaatatctgagacgacgtttgggagcaatgctctttaccaccgttcaccaaatcgtctggggcaggggttgtgagctgcagcagttgctggtgccttgtgggaaggtggggcagggaggaggctgcccgccacctctgcccccagtcacttcctgcttgacctgactcttcacatgtggatgcttaattcctgcccctctccccccagctgcttctcctttactaacacacctgctacattttacacatgtgttggtaagtgagaaacagaaacgaaaaataaattaaaatgcagaaatacaaaa

SEQ ID NO: 627 - DNA, 513 bp, Homo sapiens
atggaggttgcagtgagccgaatcatgacactgcactccagcctgggcgacagagcgagactccatctcaaaaaaaaaaaagaagaagaagaaaaagaagaagaggaagaagaggaagaggaaaagaagaaggaggagaaggagaaggagaagaagaaggagaagatgatgaggaggaggaagaaaacaaaaaacaatacaaaacaaaacaaaacctgttccaaacagcaggcactgctgaggaaggaaaagaactttcacaaaaaaaggtggcctgcagcaccgggtgtgacagcaaggtatgccaccagtaagggggatgtctcagcagctgccagcactctgcctgtgaaaacgccagctccaattcaaagaagaggcgaggtgagtaccattcacctctcccaagtggtccagtggcagtggggcccccacgcactctacaccgttgttgtgttgctagaggaaggagagcagctgagccctggggacctggggacgggcttcatttga

SEQ ID NO: 628 - DNA, 697 bp, Homo sapiens
ctgaagctcatcgactaggtgcagccacttggtgatgctggaatgccctgagacgggcaacgggctgctccacgaagtcctgctctgggagcccgagccctcgcccaaggctctaccggagccactgccggcgcctccagaaaacaagaagtagccgctgggccggcggggcatcgcttggtgagcacagccgcagcaggaggaggcccgagcctgcgccaggtctgcagcgcagaccacctgggcgggccgttcgctccggtgggcggggccaggtcagggagacccccccaggctgcctgggcggggcgtggcatccgagggagcccaacggacattccgctttccgcttccgtcccgcggggcccatcggggttttggggccgcaaccgggaccctcccggaaaatgaccttgtacaaaagctttccctccccttccccccaacgccacggccaaggcaggcccccccccccgctgttttccgtgtcaaccgtgtttgattttgggacccccgagccccccagggacccttgagggccccatcccgttatccgagacccttcctaccccccattcctcggcgctgggagctatttttgcccaaggggggggggatgggggggctggcgccaccgaacctgcacatctcaacttgtaactcaataaacagaagtgacaatcggaaaaaaaaaaaa

SEQ ID NO: 629 - DNA, 542 bp, Homo sapiens
tttttttttttttttttttgcaagaaagaaattgtttttattgcattgaggacttttccagaagcctggtggaacccacgttctccctccagccccaaaggcagtgcaagcctctactgatcccccacttaaaggtgggtctcccctcctgcagggcccatggaggaggggtagggtgggctgtaggggggcccagaagggaggccctggggacagagggagttcactcctgtttaagcctggagaccagggagggcccagcctcacctctgggcaacacagcaagtcagaggctggggtgtggcaggggctcagctggtcacctctggggtgtggcttcctcccggaaccgcaccagaggcccctggagcccagggagggaccacggagggcaggtgtaacccctggcctggagcacagctctcagagccctgaggctcccggggacagaaacaagtaacaaagtgagaccacgagagaaaaagaatccacagtttctacaaaaagccccaccctccccaagcaccctggtcagctgggga

SEQ ID NO: 630 - DNA, 551 bp, Homo sapiens
ttactctaagcgcggctctcagaagggtgcaagaagaatcagtgatttttttttttttcgaagcactgtgtttagatcaagatgtctggtaaagcaaatgcttccaagaaaaacgctcaacagttaaaaagaaatccaaagagaaaaaaggataatgaggaagttgtgttgtcagagaataaggttagaaacacagtgaaaaaaaataaaaatcatctgaaagatctgtcttctgaaggacaaacaaagcacactaacctaaaacacggaaagacagcagccagcaagagaaaaacctggcaacctctgtcaaagagtaccagagaccatttgcaaactatgatggaatcagtaataatgacaattttgagtaacagtattaaagaaaaagaagaaatacaataccatctcaacttcctgaagaaaagattgctacaacagtgtgaaactctgaaagtccctcccaaaaagatggaagatttaactaatgtatcaagtctactgaatatggaaagggcacgagacaaagctaatgaagaaggtctggcatt

SEQ ID NO: 631 - DNA, 401 bp, Homo sapiens
tctccgcgtacaggaggcggcggcggctttcagtctccggcccccgccggcgagcgcacgatgcactgcctgggcgccgagtacctggtttctgcagaaggagcccctaggcaaagggagtggcgaccccagatttataggaaatgcacagatacggcatggttattcctgttctttctcttttggactggtttggtgtttatcatgggctactcggtggtggctggagccgcgggaagactcctctttggctatgacagctttggcaacatgtgtggcaagaagaactcccccgtggaaggggcccctctttcagggcaggacatgaccctaaaaaaacacgtgttctttatgaattcctgcaacctggaagtcaaaggtacgcagctcaaccgcatggc

SEQ ID NO: 632 - DNA, 357 bp, Homo sapiens
  misc_feature (1)...(357): n = a,t,c or g
catggcattcctttggcttgtgtgctgctttgcccttgtgggcgccacctttggctgtggggtccctgccatccaacccgggctgaccggtctgtccaggatcgtcaacggagaggatgctatccctggctcctggccctggcaggagtccctgcaggacagaactggcttccatttctgcgggggctccctcatcagcgaaaactgggtggtcactgctgcccactgcggggtcaagacaaccgatgtggtggtagctggagagtttgatcaaggctccgatgaaaagaatgtccaggtcctgaaaatcgttcaggtttttaagaaccccaagttcaactccttcaccgtgcgtan

SEQ ID NO: 633 - DNA, 459 bp, Homo sapiens
tccgggtcgacccacccgtccgacgtccccctccaatacacctgccagcatctccccaaaactgaatgtggaggtcaagaaggaagtcgacaaggagaaagcggtcactgacgagaaacctaagcaaaaagacaagcctggcgaagaagaggagaagtgtgacatctcttccaaataccattacttgactgaaaatgacttagaagagagtcccaagggggggcttgatatcctcaaatccttggaaaacacagtgacatccgcaatcaacaaggcccagaacggcactcctagctgggggggctatcccagcatccatgccgcctaccaacttcccaacatgatgaagttgtccctgggctcgtcggggaagagcacgcccctgaaacccatgtttggcaacagtgagattgtctccccgacgaaaaaccagaccctggtctctccacccagcagccg

SEQ ID NO: 634 - DNA, 450 bp, Homo sapiens
atgcgcagtcatgagtcgcttcaagtttatcgatattggtatcaacttgactgaccctatgttcagaggaatttatttgggggttcaaaagcatcaagatgacttacaggatgtaataaggagagctgtcgagattggtgttaaaaagtttatgattacaggtggaaatctacaagacagtaaagatgcactgcatttggcacaaacaaatggtatcctcatatttcttttaccaaaaaaaaaatgaattaagtaattttgaagaagtctttctgaaaactgcttcaggtatgtttttcagtacagttggatgtcatcctacaagatgtggtgaatttgaaaagaataaccctgatctttacttaaaggagttgctaaatcttgctgaaaacaataaagggaaagttgtgggcaataggagaatgcggacttgattttgaccgactgcaa

SEQ ID NO: 635 - DNA, 639 bp, Homo sapiens
gggatggttccatcatggcgtcaatgcagaaacgactacagaaagaactgttggctttgcaaaatgacccacctcctggaatgaccttaaatgagaagagtgttcaaaattcaattacacacgtggattgtatacatggaaggtgcaccatgtaccttatatgaaggggaaaaatttcaacttctatttaaatgtagaagacgatatccttttgactcttctcaaggcatgtttactggtgaaaatattactgatcatcctcatgtttatagcaatggtcatatgtgcttatccattctaacaaaaaactggttcccagcgctctcagtccaatcagtttgtcttaggcattattagcatgctttccagctgcaaggaaaacgacgaccgaccacccggataattctttttatgtgcgaacaatgtaacaagaatccaaagaaaacaaaatggtggtatcatgatgatacttgttgatggccactgttatcatcctcctagcagaagatagtcctacttgagaaaatgagcactttgatccattcagtctttgaactttaaccctttgactgggaagtgacctataggcaatggagactactttcctttactgcattttaactcgtgtgcattttgggg

SEQ ID NO: 636 - DNA, 572 bp, Homo sapiens
gcggcagccgaggccaaaaagagcgtttgtcgccgtctagattacatcacgcagagcctccagcagcagggcgtgcaggcagaaaatataactgtgacaaaggattttaggagagtggaaaatgcttatcacatggaagcagagaagttactcaggcgtggtggcgtgtgactgtaatctcagctaccggggaggctgaagcagaagaaacgctcgaacctgggaggcagagcttacagtgagccgagatcgcaccactgcacttcagcctgggtgacaaagtgagactccatctacatacatacatacatacatacatacatacatacataaaatgcccagtatcttacaagactgtagttcacagtgggtaattcaaatcagacactgctcttcaagagaggtaatattaatagaaatctttcaagaaggattgttttctactattaaaacaataaaactcttataaacctgtttatcagaaggatatttctgtttcagcaactcctggaatccttcttcaacatcccaaccaacattactcccagatagccatgtcacctgtgaattat

SEQ ID NO: 637 - DNA, 409 bp, Homo sapiens
aatacattgcctccatggttttaattaccttcattttcagctgctgcatccgtacagcgtcctcctgccccgccagctctggcgtctccatcaacgtgcccagccgcgtctgctccagctcctgcaggctgcgcacgtggccggcgagcagcggctgcctgcgaggcccgcccagctctgcttccaccgccagcacctcccgcgaggcggcggcgaaggcctgggtcaccccgtgcactgtgctccggtagcgcgcgaggtcgtagtcagggccgctgcgcaggtactggcggtggcctctgcggcatgtggggaccctgaggccgcgcccccaggctctcaggccctgcaccggcgccaaccacctgaaaggcccccaggaagtggtcccagacaccaaaggggagga

SEQ ID NO: 638 - DNA, 409 bp, Homo sapiens; identical to SEQ ID NO: 637

SEQ ID NO: 639 - DNA, 797 bp, Homo sapiens
cggacgcgtgggtgaagctcaacactatttaagtaaaacaccagagtcatctgcacaaccaagtgaaacaattctttgggatgttcagacagactcaaatcctaatcaggaaaaagactcatctagtaatgagaaacaaactattagtctgccagtttctactagcaaatcaaggaaagagtctacagaaccaaagacatgtatagaaagtatggaaaagaaaacagacagtttagttcagaatggaaacgaacgttctgatgacactgtttcaaatataagcttgatagaccaaaagatgcctgacatagagccaaattctgaaaataattgtagtagtagtgatatagtcaatggacacagtgaaatagagcaaacacctttagtttcatcagatcctgctttgaaaattgatacaaacagaatcaggacagaaaatggttccattttgcccagtgttgtaccacaagaacacaacaccttgccagtatctcaggcaccttccaaaccaaatctgacaagtgaacatacttcatatggcttaattttaacaaaaccatacgtcagaccattgcctcccagttaccttgatgaacggtatcttagtatgccaaaacgcagaaaatttctgactgatagagtagatgcctgttctgatcaagataacgtgtataaaaaatcagtgaaaagattaagatgtggcaaatgcctgaccacctactgtaatgcagaagcacttgaggctcatcttgcacaaaagaaatgtcagacactctttgggatttgattcagatgat

SEQ ID NO: 640 - DNA, 628 bp, Homo sapiens
cccacgcgtccgggagagaggagtgtcagacagctgttgtcaacaggcacctggccagagtgaaaaggaggggcagattccatccaagtcccagcggcgccagctgacactctctgccaatgcccaggtgctgagcgacagtgtcccaccggtccctgtgcccagaatggcctgcaccaagaccctgcaacagtcccagcccatctccgcaggagccaccacaaccaccaccactgtggcccctgctgggggtcattctggctccacagaatgtgacctggagtgtctggtgtgccgggagccctacagctgtccccggttgcccaagctgctggcctgccagcatgccttctgcgccatctgcctgaagctcctgctgtgcgtgcaggacaacacctggtccatcacctgcccgctgtgccgcaaggtcaccgccgtccccgggggcctcatctgcagcctgcgcgaccatgaggcggtggtggggcagctggcccagccatgcacagaggtatcgctctgtcctcaggggctggtggatcctgctgacttggcagcaggacaccccagcttggtgggagaggatggacaggatgaagtaagtgcaaaccacgtggcagcccggcgc

SEQ ID NO: 641 - DNA, 812 bp, Homo sapiens
aagggtactcgaactccagccagtgaccctgctgctgggtgaccatggctgggtagagcatgtggataatggtatccgttataagttagacgtgacccagtgtatgttctcctttggaaacatcactgagaagcttcgagtggcatcgttgtcctgtgctggagaagtgctggtggatctctatgcagggattggttattatacattgcctttcctagttcatgctggtgctgccttcgtccatgcttgtgagtggaatccccatgctgtagttgctctgagaaataaccttgagatcaatgcgagtagcagatcggtgccaaatacactttggagataacagaaaactgaagctctcaaatattgcagatagggtgatcctggggctgattcccagctctgaagaaggctggcccattgcctgccaagtgttaaggcaggatgctggaggccattttgcatatccaccaaaatgtggaatctttcccagggaagaatcttcaggctcttggagtcagcaaagtagagaaagagcattggctgtatcctcagcaaattaccaccaaccaatgggaaaaatgggagctaccagggattctaggggaaaaattgctgtcaccagccaccaagccacagttggcaaaggtgggcagaatctgcagaaactcgaatcgccactcttcttcagcaggtgcatgggaaaccatggaagacacaaattctgcacatccaaccagtgaaatcctatgctccccatgtggatcacatagtcctggatctggaatgctgcccctgtccttcagttggctaga

SEQ ID NO: 642 - DNA, 1236 bp, Homo sapiens
cgagtccctgtcggtgtcctttgagcacggtgctgccgccatccgcccccaccagtgaggctgggctgagcctcccgctgcgtggcccccgggcgcggcgctcggcttccccacacgatgtggacctgtgcctggtgtcaccctgtgaatttgagcatcgcaaggcggtgccaatggcaccggcacctgcgtcccccggcagctcgaatgacagcagtgcccggtcacaggaacgggcaggtgggctgggggccgaggagacgccacccacatcggtcagcgagtccctgcccaccctgtctgactcggatcccgttgcccctggcccccggtgcggcagactcagacgaagacacagagggctttggagtccctcgccacgaccctttgcctgaccccctcaaggtccccccaccactgcctgacccatccagcatctgcatggtggaccccgagatgctgccccccaagacagcacggcaaacggagaacgtcagccgcacccggaagcccctggcccgccccaactcacgcgctgccgcccccaaagccactccagtggctgctgccaaaaccaaggggcttgctggtggggaccgtgccagccgaccactcagtgcccggagtgagcccagtgagaagggaggccgggcacccctgtccagaaagtcctcaacccccaagactgccactcgaggcccgtcggggtcagccagcagccggcccggggtgtcagccaccccacccaaggtccccggtctacctggacctggcctaccctgcacagcgggagcagcgcccacctggtggatgaggagttcttccagcgcgtgcgcgcgctctgctacgtcatcagtggccaggaccagcgcaaggaggaaggcatgcgggccggtcctgacgcggctactgggcagcaaagcagcatttgggaccgtgacctgcaggtgcgtgtcaccccagggcctctggtggtgaccctgatccccactttcgactcggtggccatgcatacgtggtacgcagagacgcacgcccggcaccaggcgctgggcatcacggtgttgggcagcaacagcatggtgtccatgcaggatgacgccttcccggcctgcaaggtggagttctagccccatcgccgacacgccccccactcagcccagcccgcctgtccctagattcagccacatcagaaataaactgtgactacacttggcaaaaaaaaaaaaaaaaaaa

SEQ ID NO: 643 - DNA, 1011 bp, Homo sapiens
cctccgtgaagcccctgctttcaggggttagttctggagtggcccagccctggggccttcccctctgtcaggggaagtgacatggtggccactgatgagactgtctgtgtatgttcaggttgtgaaggagctcctgacccagggagctgaccccaacctgcccctgaccaaaggcttgggcagtgccctgtgtgttgcctgtgacctgacctactagcaccagaggaacatggacagcaagctggccctgattgaccgactcatcagtcacggggccgacatcctgaagcctgtaatgctcaggcagggagaaaaggaggcagtgggcacagccgtggactatggctacttcagattcttccaggaccggaggattgcccgctgccccttccacacgctgatgccagcagagcgcgagacgttcctggcgcggaagcggctcctggagtacatgggcttgcagctacggcaggctgtctttgccaaggagagccagtgggaccccacgtggctgtacctgtgcaagagagcggagctgatccccagccacaggatgaagaagaagggccccagcctgcccaggggcctggatgtgaaggagcaggggcaaattcccttcttcaagttctgctaccagtgtggccgctccatcggggtccgcctcttgccctgccctcgctgctacgggatcctgacctgcagcaagtactgcaagaccaaggcctggaccgagttccacaagaaggactgcggggacctggtggccatcgtgacacaactggagcaagtttccaggaggagagaagaattccagtgaagcagcagctgcacgtccgaggcttggggaggacccaggactgtgtgggtttcttacctgcctgagccacctcagggaatcttccagcctaatgcaggcatttctgcacctttggggtcatgctttgtagcagtgtctcccttgcgacctcgcaataaattggccccacggggtgattttgacagtcaaaaaaa

SEQ ID NO: 644 - DNA, 336 bp, Homo sapiens
  misc_feature (1)...(336): n = a,t,c or g
aaagttggccacaccacctgctgcccaggagtcatcccgccggcggtccaggaagggtcatctgccagcccccgtgcagccgtatgaacacgggtatccagtctctggcgggtttgccatgccacccgtctccttataccatatcctcaccacctccttctcctcccatgctgttgatatctctcttgatatgtgctgtttcattcttctactaccatctcttctttnnnnnnnnnnnnnnnnnnnnnnnnnnnnnnnnnnnnataatttctttctctgtctttaactttttcnnnnnnnnnnnnnnnnnatctttgatattagnnnnnnnnnnag

SEQ ID NO: 645 - DNA, 1135 bp, Homo sapiens
gtaaatacaggagtcttttaattccttgtaaggaaaatttcctggataattccatgtattttaataatcacagagatagtcctatccttattcattatcaaaaatactgtggtaacaatttatagatgcacacaatctcatctattttgacataaaaaaggcagaaaggcaaaatacaaattctgagacagagagtaaaacaatacgacatccttaggtttatttattttattgtttgtttcactgtttgaatgtttatcttgcgagagtctacagaattgagagaaaatatctgcaggctaattttacataacatgaggcaaagattaagcactaaatataaaaaataaaacttttagcttgcttattaaactaggaagaattttcctggaaaccacagcagttaaattggtctacaatgccattaataaatgggagaacacggatctcgcctatggaaatattttaaacattgtgggacggctacccaaaaaggctcattgggtatataagagttttcaaggtcacagtcctctaagcagactaaatacaagttagtttttaaaccctgaaattcaggaagtgccaaaatcctgtaaaaaataaaaatattccccattgttcctcagcaatctatggattaaccctttacaaatcccttaaaagtcttttccagtaacatgaacccatgatctccttgacaagttcccttgccttaagtggcaagtaacttttgaagctggacttctcaatctgtagagagaagcaagctgcattcacagcattgctcccttttgaaaattatcttctgaagagaagaaggtccagcaaagatcttcagtgcaatactccctgcatatgtgcaagtctgcatgagaggtccccccacaggtgcagctgccagccaacgaatcagaaacagatgaaagaggagagaagaaaacagaggtcaaacacttcagtttacagatgctattccagataaaatgccaagggcttggccgggcgcggtgactcacgcctgcaatcccagcaccttgggaggccggggcaggcggatgacgaggtcaggagatcgagaccatcgtggccaacatggtgaaaccccgtctctactaaaaatccaaaaaaaaaa

SEQ ID NO: 646 - DNA, 898 bp, Homo sapiens
ttcagaagaacactcattacatgatgatctttgatgcctttgtcattctgacttgcttggtttcattaatcctctgcattagatctgtgattagaggacttcagcttcagcaggagtttgtcaattttttcctcctccattataagaaggaagtttctgtttctgatcaaatggaatttgtcaatggatggtacattatgattattattagtgacatattgacaatcattggatcaattctaaaaatggaaatccaagctaagagtctaactagttatgatgtctgtagcatacttcttgggacttctaccatgctcgtgtggcttggagtcatccgatacctcggtttctttgcaaagtacaacctcctcattttgacccttcaggcagcgctgcccaatgtcatcaggttctgctgctgtgcagctatgatttacttaggttactgcttctgtggatggatcgtgctggggccttaccatgacaagtttcgttctctgaacatggtctctgagtgccttttctctctgataaatggagatgatatgtttgccacgtttgcaaaaatgcagcaaaaaagttacttagtctggctgtttagtagaatttacctctactcattcatcagcctctttatatatatgattttaagtcttttcattgcactgatcactgatacatacgaaacaattaagcaataccaacaagatggcttcccagagactgaacttcgtacatttatatcagaatgcaaagatctacccaactctggaaaatacagattagaagatgaccctccagtatctttattctgctgttgtaaaaagtagctatcaggtttatctgtactttagaggaaaatataatgtgtagctgagttggaacactgtggatattt

SEQ ID NO: 647 - DNA, 350 bp, Homo sapiens
ccctgctgctcgcatcccaacgcggtgctcggcgtacagcagacgctggaggagatggacttccagaggggaatctggtcggcagccctgaatggagacctgggccgagtgaagcatttaatccagaaggccgaggacccaagtcagcccgactcggccggctacactgcgctgcactatgccagccgcaatgggcactacgctgtgtgccagttcctgctggaaagcggagctaagtgtgatgcccagacccacgggggtgccactgctctgcaccgagccagctactgcgggcacactgaaatcgggcggctcctgctatcacatgggtccaaccccaaggtggggga

SEQ ID NO: 648 - DNA, 350 bp, Homo sapiens; identical to SEQ ID NO: 647

SEQ ID NO: 649 - protein, 93 aa, Homo sapiens
RQLLEQSRHSWVNTTVLITGCTNAAGLLVVGNFQLVLGGVFFVHESSQLQHGAALCEWVCVIDILIFYGTFSYEFGAVSSDTLVAALHLAPGP

SEQ ID NO: 650 - protein, 67 aa, Homo sapiens
TLQQAEYEFLSFVRQQTPPGLCPLAGNSVHEDKKFLDKYMPQFMKHLHYRIIDVSTVKELCRRWYPD

SEQ ID NO: 651 - protein, 107 aa, Homo sapiens
SSCHGWILGEHGDSSVAVWSGVNVAGVSLQELNPEMGTANDSENWKEVHKMVVESAYEVIKLKGYTNWAIGLTSVINQKLKDDEVAQLKKSADTLWDIGCRNLKTTM

SEQ ID NO: 652 - protein, 95 aa, Homo sapiens
KNMSFVNDLTVTQDGRKIYFTDSSSKWQRRDYLLLVMEGTDDGRLLEYDTVTREVKVLLDQLRFPNGVQLSPAEDFVLVAETTMARIRSSLVKRR

SEQ ID NO: 653 - protein, 130 aa, Homo sapiens
MNRTVENSTPLQDFVFTSSFTNPKPNPLLKISLAALPRSAYDGGIHIGRAQVCPWVAMARPRAERCLLHFALQLLQLQPDRERAKRLQQLAERWRRPPSGHHQIPLFPRPRHGDPRTDLRASNVYSSIIC

SEQ ID NO: 654 - protein, 1136 aa, Homo sapiens
MKLMETLNQCINAGHEMTKAIAIAQFNDDSPEARKITRRWRIGEAADLVGVSSQAIRDAEKAGRLPHPDMEIRGRVEQRVGYTIEQINHMRDVFGTRLRRAEDVFPPVIGVAAHKGGVYKTSVSVHLAQDLALKGLRVLLVEGNDPQGTASMYHGWVPDLHIHAEDTLLPFYLGEKDDVTYAIKPTCWPGLDIIPSCLALHRIETELMGKFDEGKLPTDPHLMLRLAIETVAHDYDVIVIDSAPNLGIGTINVVCAADVLIVPTPAELFDYTSALQFFDMLRDLLKNVDLKGFEPDSAHDPPAVHLSNGPGQEPIAVMTFDLTKITKTSSSFEVRTWDPEGVIFYGDTNPKDDWFMLGLRDGRPEIQLHNHWAQLTVGAGPRLDDGRWHQVEVKMEGDSVLLEVDGEEVLRLRQVSGPLTSKRHPIMRIALGGLLFPASNLRLPLVPALDGCLRRDSWLDKQAEISASAPTSLRSCDVESNPGIFLPPGTQAEFNLRGSSGSKSVGPLRGLVAVCEALGLWSQTAGIRMASVRIREAKEGDCGDILRLIRELAEFEKLSDQVKISEEGPCVVGYGIYYFIYSTWKGRTIYLEDIYVMPEYRGQGIGSKIIKKVAEVALDKGCSQFRLAVLDWNQRAMDLYKALGAQDLTEAEGWHFFCFQGEATRKLAGNWQSERQIPFGDVRLPPPADYNKEITEGDEVEVYSRANEQEPCGWWLARVRMMKGDKVAQVIHNFSFFTMCQFYVIEYAACDATYNEIVTLERLRPVNPNPLATKGSFFKVTMAVPEDLREACSNENVHKEFKKALGANCIFLNITNSELFILSTTEAPVKRASLLGDMHFRSLRTKLLLMSRNEEATKHLENCIRVRNIETKLVTGKVGTQNTQLLGNTLTGSTAAKGVGVLIEGLATSKNPLMTLKPNDTNSVYIDYETEDDTSDGVYPNQGNVTSQPLHFQATLKQDGNIAIEPGEFKATSTFQAEAKLPSKHPICSKFRGSLQRMGRGYWIQLFFSPPVHPDYGKQEAKADLSFSFVANEVLSERREAFISIDSEEGALLEDNGMLLAHWIIYVSEICDYCNLRFQGSSVTGMISMDGSYCFDIHVSSSELFSSVTEHLLRTFSSHIIPRLECRSDATTSEKD

SEQ ID NO: 655 - protein, 118 aa, Homo sapiens
  misc_feature (1)...(118): Xaa = any amino acid or nothing
SSVHDLLVAAMSATSEIQDPRGRGDGPGGLPDVVAIPWPPRXILSQEEHHPTDNQDIEPGQEREGTPPIEERKVEGDCQEMDLEKTRSERGDGSDVKEKTPTXILKHAKTKEAGDGQP

SEQ ID NO: 656 - protein, 24 aa, Homo sapiens
  misc_feature (1)...(24): Xaa = any amino acid or nothing
RNEXLLTRFSPLSLSHXVLGVSMF

SEQ ID NO: 657 - protein, 200 aa, Homo sapiens
  misc_feature (1)...(200): Xaa = any amino acid or nothing
ENGTTGEREGSLRTHPGYPRSPLGHHDPHCCKPFLLSTAGQPPNYEMLKEEQEVAKLGAPQKPCLPECPRVINIRNETSWPDHVRLVPVQHPLHEHLLRLGFIRFAYSVKSLRDRKMVGDVNRGPKAXCLHRQVPENLGPDFGHLHDHFCSSHHHPVLGRPGPAIDQEASLRPGALPVTCIPRTLSSIPRPAPRGQELCP

SEQ ID NO: 658 - protein, 387 aa, Homo sapiens
  misc_feature (1)...(387): Xaa = any amino acid or nothing
KMAEEVVVVAKFDYVAQQEQELDIKKNERLWLLDDSKSWWRVRNSMNKTGFVPSTYVGRENSARKASIVKNLKDTLGIGKVKRKPSVPDSASPADDSFVDPGERLYDLNMPAYVKFNYMAEREDELSLIKGTKVIVMEKCSDGWWRGTYNGQVGWFPSNYVTEESDSPLGDHVGSLSEKLAAVVNNLNTGQVLHVVQALYPFSSSNDEELNFEKGDVMDVIEKPENDPEWWKCRKINGMVGLVPQKLWXPLLQSIQLTSGLGTLTFQCGFIRPYIPGKFVGNPWYYGKVTRHQAEMALNERGHEGDFLIRDSESSPNDFSVSLKAQGKNKHFKVQLKETVYCIWQRKSCTMEXLVEHYKKAPNFYNVNKGEKLYLVKHLSMILLTQK

SEQ ID NO: 659 - protein, 120 aa, Homo sapiens
  misc_feature (1)...(120): Xaa = any amino acid or nothing
VVGLLDWPLRVRADPVSGCGGKMAELRVLELSRGSSTTPXRSEXSLTADLRLNEPRYATLPNIMKAKKKKIEVIKPGDLGVDLTSKLSVISVEDPPQRTAGVKVETTEDLVAKLKEIGRI

SEQ ID NO: 660 - protein, 332 aa, Homo sapiens
  misc_feature (1)...(332): Xaa = any amino acid or nothing
EERLGEDIFRSGTLWPNAGGRAFSQAVYCLNGFIDTSVRLLDKIERNTLTRQSSLPKDRGKRSRAFVFELSGEHWTELPDSLKEQTHLREWYISNTLIQIIPTYIQLFQAMRILDLPKNQISHLPAEIGCLKNLKELNVGFNYLKSIPPELGDCENLERLDCSGNLKLMELPFELSNLKQVTFVDISANKFSSVPICVLRMSNLQWLDIHRHNLADLAEDIDRLEELQSFLLYKNKLTYLPYSMLNLKKLTLLVVSGDHLVELPTALCDSSTPLKFVSLMDNPIDNAQCEDGNEIMESERDRQHFDKEVTESLYXSPXRKRICSQLYHQSVF

SEQ ID NO: 661 - protein, 109 aa, Homo sapiens
  misc_feature (1)...(109): Xaa = any amino acid or nothing
RPLKPRRTFCKXVCKAPTPHKSDHSTKKGKDSSVRPQGKRRYDRKQSGYGGHTKPIFRIKAKTTEKIVLRLECVEPNCRSKRMLAIKRWQAFLNLGGDKKRKGPSASKF

SEQ ID NO: 662 - protein, 387 aa, Homo sapiens
MELKAKARELREECRSLRSRCDQLEERVSVMENEMNEMKREGKFREKRIKRNEQSLQEIWDYVKRPNLHLIGVPESDGENGTKLENTLQDIIQENFPNLARQANIQIQEIQRTPQRYSSRRATPRHIIVRITKVEMKEKMLRAAREKGRVPHKGKPIRLTADLSSETLQARREWGPIFNILKRIFSFPQRGGTGGRRMVKLTAELIEQAAQYTSAVRDRELDLRGYKIPVIENLGATLDQFDAIDFSDNEIRKLDGFPLLRRLKTLLVNNNRICRVLDFQKVKLKERQEAEKMFKGKRGAQLAKDIARRSKTFNPGAGLPTDKKKGGPSPGDVEAIKNAIANASTLAEVERLKGLLQSGQIPGRERRLGPTDDGEEEMEEDTVTNGS

SEQ ID NO: 663 - protein, 116 aa, Homo sapiens
PSTFVEHSISCKEKLNKKNKIGAAFTDDGFAMGVAYILKLLDQYREFDSLHWFQSVREKYLKEIRAVAKQQNVQSASQDEKLLQTMNLTQKRLDVYLQARIFFRADKTAAEENQEK

SEQ ID NO: 664 - protein, 188 aa, Homo sapiens
  misc_feature (1)...(188): Xaa = any amino acid or nothing
VSRIRQNISTRRXRQACLTALVNLYLQGLPPPTSLWGFYFDRDDVALEGVSHFFRRIGPRKKREGYERSSXKMQKTSRGRPALFFQDNQDSQLEDEWGKTPQTPMKAAMALEEKAXTQALFGSFIALGFLPARTPMLLXASLETHFLDEEVKLIKKMGDHLTNLHRLGGPEAGAGAKYLFERLTLKHD

SEQ ID NO: 665 - protein, 209 aa, Homo sapiens
FFYKSVLAQKEVRCVLDEISPLGPPELKPVRMFADLLPHESRRDSSVPELAEKMSRSVDVPTPPSLLMAASIYLHDQNPDAALRALHQGDSLECTAMTMQDAYYIFQEMADKCSPTLLLLNGQAACHMAQGRWEAAEGLLQEALDKDSGYPETLVNLIVLSQHLGKPPEVTNRYLSQLKDAHRSHPFIKEYQAKENDFDRLVLQYAPSA

SEQ ID NO: 666 - protein, 3257 aa, Homo sapiens
KMWPTRRLVTIKRSGVDGPHFPLSLSTCLFGRGIECDIRIQLPVVSKQHCKIEIHEQEAILHNFSSTNPTQVNGSVIDEPVRLKHGDVITIIDRSFRYENESLQNGRKSTEFPRKIRDRRPARRVSRSSFSSDPDEKAQDSKAYSKITEGKVSGNPQVHIKNVKEDSTADDSKDSVAQGTTNVHSSEHAGRNGRNAADPISGDFKEISSVKLVSRYGELKSVPTTQCLDNSKKNESPFWKLYESVKKELDVKSQKENVLQYCRKSGLQTDYATEKESADGLQGETQLLVSRKSRPKSGGSGHAVAEPASPEQELDQNKGKGRDVESVQTPSKAVGASFPLYEPAKMKTPVQYSQQQNSPQKHKNKDLYTTGRRESVNLGKSEGFKAGDKTLTPRKLSTRNRTPAKVEDAADSATKPENLSSKTRGSIPTDVEVLPTETEIHNEPFLTLWLTQVERKIQKDSLSKPEKLGTTAGQMCSGLPGLSSVDINNFGDSINESEGIPLKRRRVSFGGHLRPELFDENLPPNTPLKRGEAPTKRKSLVMHTPPVLKKIIKEQPQPSGKQESGSEIHVEVKAQSLVISPPAPSPRKTPVASDQRRRSCKTAPASSSKSQTEVPKRGGERVATCLQKRVSISRSQHDILQMICSKRRSGASEANLIVAKSWADVVKLGAKQTQTKVIKHGPQRSMNKRQRRPATPKKPVGEVHSQFSTGHANSPCTIIIGKAHTEKVHVPARPYRVLNNFISNQKMDFKEDLSGIAEMFKTPVKEQPQLTSTCHIAISNSENLLGKQFQGTDSGEEPLLPTSESFGGNVFFSAQNAAKQPSDKCSASPPLRRQCIRENGNVAKTPRNTYKMTSLETKTSDTETEPSKTVSTVNRSGRSTEFRNIQKLPVESKSEETNTEIVECILKRGQKATLLQQRREGEMKEIERPFETYKENIELKENDEKMKAMKRSRTWGQKCAPMSDLTDLKSLPDTELMKDTARGQNLLQTQDHAKAPKSEKGKITKMPCQSLQPEPINTPTHTKQQLKASLGKVGVKEELLAVGKFTRTSGETTHTHREPAGDGKSIRTFKESPKQILDPAARVTGMKKWPRTPKEEAQSLEDLAGFKELFQTPGPSEESMTDEKTTKIACKSPPPESVDTPTSTKQWPKRSLRKADVEEEFLALRKLTPSAGKAMLTPKPAGGDEKDIKAFMGTPVQKLDLAGTLPGSKRQLQTPKEKAQALEDLAGFKELFQTPGHTEELVAAGKTTKIPCDSPQSDPVDTPTSTKQRPKRSIRKADVEGELLACRNLMPSAGKAMHTPKPSVGEEKDIIIFVGTPVQKLDLTENLTGSKRRPQTPKEEAQALEDLTGFKELFQTPGHTEEAVAAGKTTKMPCESSPPESADTPTSTRRQPKTPLEKRDVQKELSALKKLTQTSGETTHTDKVPGGEDKSINAFRETAKQKLDPAASVTGSKRHPKTKEKAQPLEDLAGWKELFQTPVCTDKPTTHEKTTKIACRSQPDPVDTPTSSKPQSKRSLRKVDVEEEFFALRKRTPSAGKAMHTPKPAVSGEKNIYAFMGTPVQKLDLTENLTGSKRRLQTPKEKAQALEDLAGFKELFQTRGHTEESMTNDKTAKVACKSSQPDLDKNPASSKRRLKTSLGKVGVKEELLAVGKLTQTSGETTHTHTEPTGDGKSMKAFMESPKQILDSAASLTGSKRQLRTPKGKSEVPEDLAGFIELFQTPSHTKESMTNEKTTKVSYRASQPDLVDTPTSSKPQPKRSLRKADTEEEFLAFRKQTPSAGKAMHTPKPAVGEEKDINTFLGTPVQKLDQPGNLPGSNRRLQTRKEKAQALEELTGFRELFQTPCTDNPTADEKTTKKILCKSPQSDPADTPTNTKQRPKRSLKKADVEEEFLAFRKLTPSAGKAMHTPKAAVGEEKDINTFVGTPVEKLDLLGNLPGSKRRPQTPKEKAKALEDLAGFKELFQTPGHTEESMTDDKITEVSCKSPQPDPVKTPTSSKQRLKISLGKVGVKEEVLPVGKLTQTSGKTTQTHRETAGDGKSIKAFKESAKQMLDPANYGTGMERWPRTPKEEAQSLEDLAGFKELFQTPDHTEESTTDDKTTKIACKSPPPESMDTPTSTRRRPKTPLGKRDIVEELSALKQLTQTTHTDKVPGDEDKGINVFRETAKQKLDPAASVTGSKRQPRTPKGKAQPLEDLAGLKELFQTPVCTDKPTTHEKTTKIACRSPQPDPVGTPTIFKPQSKRSLRKADVEEESLALRKRTPSVGKAMDTPKPAGGDEKDMKAFMGTPVQKLDLPGNLPGSKRWPQTPKEKAQALEDLAGFKELFQTPGTDKPTTDEKTTKIACKSPQPDPVDTPASTKQRPKRNLRKADVEEEFLALRKRTPSAGKAMDTPKPAVSDEKNINTFVETPVQKLDLLGNLPGSKRQPQTPKEKAEALEDLVGFKELFQTPGHTEESMTDDKITEVSCKSPQPESFKTSRSSKQRLKIPLVKVDMKEEPLAVSKLTRTSGETTQTHTEPTGDSKSIKAFKESPKQILDPAASVTGSRRQLRTRKEKARALEDLVDFKELFSAPGHTEESMTIDKNTKIPCKSPPPELTDTATSTKRCPKTRPRKEVKEELSAVERLTQTSGQSTHTHKEPASGDEGIKVLKQRAKKKPNPVEEEPSRRRPRAPKEKAQPLEDLAGFTELSETSGHTQESLTAGKATKIPCESPPLEVVDTTASTKRHLRTRVQKVQVKEEPSAVKFTQTSGETTDADKEPAGEDKGIKALKESAKQTPAPAASVTGSRRRPRAPRESAQAIEDLAGFKDPAAGHTEESMTDDKTTKIPCKSSPELEDTATSSKRRPRTRAQKVEVKEELLAVGKLTQTSGETTHTDKEPVGEGKGTKAFKQPAKRNVDAEDVIGSRRQPRAPKEKAQPLEDLASFQELSQTPGHTEELANGAADSFTSAPKQTPDSGKPLKISRRVLRAPKVEPVGDVVSTRDPVKSQSKSNTSLPPLPFKRGGGKDGSVTGTKRLRCMPAPEEIVEELPASKKQRVAPRARGKSSEPVVIMKRSLRTSAKRIEPAEELNSNDMKTNKEEHKLQDSVPENKGISLRSRRQDKTEAEQQITEVFVLAERIEINRNEKKPMKTSPEMDIQNPDDGARKPIPRDKVTENKRCLRSARQNESSQPKVAEESGGQKSAKVLMQNQKGKGEAGNSDSMCLRSRKTKSQPAASTLESKSVQRVTRSVKRCAENPKKAEDNVCVKKITTRSHRDSEDI

SEQ ID NO: 667 - protein, 88 aa, Homo sapiens
VGGGTGFIGTALTQLLNARGHEVTLVSRKPGPGRITWDELAASGLPSCDAAVNLAGENILNPLRRSARALKLIPTRAQGGQCPTDENL

SEQ ID NO: 668 - protein, 191 aa, Homo sapiens
EFIFPSPLVLFPIRIMKMGLLCEVSAAVPAVLFLTDLVGLGPCLKAKNVSVFFFFVFVLVMCNLSLITVEQISLTQITREGKGASARNTNLFLFCFGEQKWSKGKVRDKLNNLVLFDKATYDKLCKEVPNYKLITPAVVSERLKIRGSLARAALQELLSKGLIKLVSKHRAQVIYTRNTKGGDAPAAGEDA

SEQ ID NO: 669 - protein, 236 aa, Homo sapiens
  misc_feature (1)...(236): Xaa = any amino acid or nothing
MAGAAPRLPWSRPHGSCGWWPMQPLQGPGRRAVAAAWEVATPVFMPVGTQATMKASRPNSWTLWVAASAWEYLPSGSKAGGTAAFPDGVAGVSVRGDGGGLRFRSPYDGNETLLSPENPCRSRMRWAPGVVTGALLQVNPLAGPVHAAHQRPDKQNLFAIIQVGWTQISGPPALKRFGSAWHSRAFLTHCCTVTTRPRCTTSRPQHRLPAELMSAVRTSIVEKRFPDSCGTSWAPX

SEQ ID NO: 670 - protein, 267 aa, Homo sapiens
  misc_feature (1)...(267): Xaa = any amino acid or nothing
EGPAEENMAAKVFESIGKFGLALSVQDSMVNSALCNVYAGHRAAIFDQFRGVQNIVVWEGTHFLIPWVRKPIMFDCCSQPRSPPVITGSKDLQNVNITLCILFRPITSQLPRIFTSIGEDYDECVLPFITTEILKSLVARFDAGELITQRELVSSQVSNNLMEXAATFGLILDDVSLTHLTFLKELTEQVAPQEAESARFVVEKAAIISAEGDSKAAELIANSLATAGDGQSELCKLEAAEDIAYQLSCSRNITCLPAGQSVLLQLP

SEQ ID NO: 671 - protein, 208 aa, Homo sapiens
GPAVPRWMGQRPGSGGWTAVAKPGELGLPHPLSTGGLPVASEDGALRAPESQSVTPKPLETEPSRETAWSIGLQVTVPFMFAGLGLSWAGMLLDYFQANTGQIDDPQEQHRVISSNLALIQVQATVVGLLAAVAALLLGVVSREEVDVAKVELLCASSVLTAFLAAFALGVLMVCIVIGARKLGVNPDNIATPIAARPGDLITLSILA

SEQ ID NO: 672 - protein, 61 aa, Homo sapiens
RWRGHSLHEIFKRSVTQNNLIEYRIPIMSLCCASDTRQSFNTTSVPAVKKLTVTVNTISIF

SEQ ID NO: 673 - protein, 302 aa, Homo sapiens
  misc_feature (1)...(302): Xaa = any amino acid or nothing
ALRQSHSQKLRRLWTAASQGSMPDKACVVTLATIAWMVSFVSNYSHTANILPDIENEDFIKDCVRIHNKFRSEVKPTSQVICLYMTWDPALAQIAKAWASNCQFSHNTRLKPPPQAWHPNFHFHWGENIWDLGLLPIFSVSSAITNWYDEIQDYDFKTRICKKVCGHYTQVVWADSYKVGCAVSILALKVSGFDRLSPNGAHFYMQLPGPGGNYPTTWPYKRGATLCSACPNNDKCLDNLCVNRQRDQVKRYYSVVYPGWPIYPRXQRRSSLFLIGNSVILILCVIITILVQHKYPNLVLLD

SEQ ID NO: 674 - protein, 164 aa, Homo sapiens
ASGSVITSGIWASRPRIRTIAPSETPSSSFVVFKRRKRRRKSHLASLKRDDNMNTSEDEDMFPIEMSSDEAMELLESSRTLPNDIPPFQDDIPEENLSLAVIYPQSASYPNSDREWSPTPSSLVDCKRTAPHLAVAAEGGLSSSCPPQSSLFHPSESPSGSRPS

SEQ ID NO: 675 - protein, 286 aa, Homo sapiens
  misc_feature (1)...(286): Xaa = any amino acid or nothing
SNLILRNLFCPHLALASSAFDKCQEEETVEKTELLAERRGLTENPSRLPPITAGLRSDTMNHIVANLLLSCQQRPRLPNYEMLKEEHEVAVLGAPQKPCLPECPPVIHYPQARPPWPDHVRLVPVQTPSSMNPCMPWASXAFAYSVKSLRDRKMVGDVEPGPQGLMPPPAKVPEKSGPVILGHLHEPILAHHHPPPSVGRPGPNGXIKEGITEGQGALPRXTCNPTVLQLSIPRPAPRGQEVLPLNCIPLTPPSIPRPVPTAESCISPLSSHAFLQWHSIKCICFW

SEQ ID NO: 676 - protein, 213 aa, Homo sapiens
  misc_feature (1)...(213): Xaa = any amino acid or nothing
TPHFHQGTGKRAAWPTCFKPAGPGKIRQTXRPRKAQRRRRIAPRPRVGVPIRPIVRCPTVRVHTKVRAGPRLPALRKLRVAGIHKKVARTFGISVDPRKPDQVPRSSFKANVQRLKEYRSKLILFPQRSPRPPKKGDRSAEELKLATQLTGPVMPVRNVQKKEKARVITEQEKNFKAFASLRMARANAPALRHTGQKEPREAAEPGCXKAHNK

SEQ ID NO: 677 - protein, 292 aa, Homo sapiens
  misc_feature (1)...(292): Xaa = any amino acid or nothing
ACAPLVAASGSEVRRSSAAWAMVQLRPRASRAPASAEAMVDEGQLASEEEEAEHGLLLGQPSSGAAAEPLEEDEEGDDEFDDGGPEEHNLFASAQAEAREEERRVRETVRRDKTLLKEKRKRTREELFIEQKKRKLLPDTILEKLTTASQTNIKKFPRKRXKKVNLQKKNEDCEKGNDSKKVKVQKVQSVSPEXKLASAVRLKGPRFWRDSRQQAAQAFIHNSLYGPGTNRTTVNKFLSLANKRLPVKRDCCTSFLNNAWGIQKKQNAKRFKRTVGWVRKGWKTKEVNPMLK

SEQ ID NO: 678 - protein, 373 aa, Homo sapiens
  misc_feature (1)...(373): Xaa = any amino acid or nothing
ELVPRSLGNLLRPPMPTPHEAEKQITGPEEADRPPSMSSHDTASPAAPSRSPCCLCWCXCCNCSWNQQRRRAWQASRESKLQPLPICEVCATPSPEEVQSWAQSFDKLMHSLAGLSVFRAFLRTEYSEENMLFWLACEELKAEANQHVVDEKARLIYEDYVSILSPKEVSLDSRVREGINKNMQEPSAHTFDDAQLQIYTLMHRDSYPRFLSSPTLPVPCLLQGPFTVLPSRGLRPPPSSTDPAASYGRLWVPFRCWCRQGCQGTCLAGWGPHPRKTVLRPSWEVLCLLGLPTRGQAGTPGAGRASRCRAGQKPPHRPAAGWPSAPGWGLLRGESKGSPQEPCWTHEPRWGLLHRQPMGPRQAFGGEQNLRIV

SEQ ID NO: 679 - protein, 127 aa, Homo sapiens
  misc_feature (1)...(127): Xaa = any amino acid or nothing
GGKNNXNCKRDXWNCKLXXCQFXQLXAKDIXKSNREHKLTNGSNGRNTESPAAIHPCGNPTVIEDALDKIKSNDPDTTEVNLNNIENITTQTLTSPSFFPKAATTSSSSPSFTPREKAHYQKHCRSH

SEQ ID NO: 680 - protein, 127 aa, Homo sapiens; identical to SEQ ID NO: 679
  misc_feature (1)...(127): Xaa = any amino acid or nothing

SEQ ID NO: 681 - protein, 90 aa, Homo sapiens
TSSGRENTVSWLTAGEENALFLWQASVGSVIKMMAGCGEIDHSINMLPTNRKANESCSNTAPSLTVPECAICLQTCVHPVSLPCKHVFCY

SEQ ID NO: 682 - protein, 116 aa, Homo sapiens
GMAEEKTVRDKEYKALQIKLERLEKLCRALQTERNELNEKVEVLKEQVSIKAAIKAANRDLATPVMQPCTALDSHKELNTSSKRALGAHLEAEPKSQRSAVHKPPSTGSAPANRVG

SEQ ID NO: 683 - protein, 159 aa, Homo sapiens
  misc_feature (1)...(159): Xaa = any amino acid or nothing
QLVQACDPGCIAHLQPRGLRHAGLPQRKEGQRWLLHARSRLKGGAHPVEGRVQVXHHLQVEEVRILPAVGWGRRPLPVTEGLVEVRLSDSWSQACDPGWIAHYSHVGCGMLGFPSEKRVNAGFYTPVAVXRAGLTLXRAVSKFXTASHLAQCGTPVGFI

SEQ ID NO: 684 - protein, 137 aa, Homo sapiens
  misc_feature (1)...(137): Xaa = any amino acid or nothing
GRAGSRKWLLLTGSLASTSPSLLSGQGPWAPLQRAMKPPGGESSNLFGFPEEATPSSRPNRMSSNIFGPTEEPQNILKRTNPPGVXGSGIFDESTPVQTRQHLNPPGGKTSDIFGSPVTATSRLAHPNKPKDHVFLM

SEQ ID NO: 685 - protein, 59 aa, Homo sapiens
EIPLPTGCLDELLKAAECPAAGSVDLGVCLDTSSSGLDLPMKVVDMFRSCLPACAVNFK

SEQ ID NO: 686 - protein, 33 aa, Homo sapiens
PYGTWMKLETIILSKLTQEQKTKHCMFLLISGS

SEQ ID NO: 687 - protein, 79 aa, Homo sapiens
HYQQQRQQMMCLERHIKPPKELDTASSDEENKDGDFTVFECPGLAPTGEMEVRNPLLDHSPPAPRPRGPRGGAGPGASH

SEQ ID NO: 688 - protein, 1380 aa, Homo sapiens
  misc_feature (1)...(1380): Xaa = any amino acid or nothing
MDESTFAGGQEYGGWVPEHHKSNEPKSGHIEKGNTDQCQERTPQPMIYPTGEIESTVNAWMLSHEKEQSQILLISNCLDALKHRSCDYGLKIALDIKHRLKIQPKIFIYTRTHKYAVTLHMLAHTITSERDDIEEWLNAWVVDQCCPPEMSVMMEMFYIYAVHYGRSLLSWSQEEEKEKGGREEEEEEEEEEEEEEEEEEEEEEEEEEEAEEEKLGEAAVPEGVQLGWLTALSLVVNFHPVVLVSPWTWYRPCAILISLDRARAAAQGGSRKGWAEFQARGTERREQCSAALVREMEQRLLCGLLHPRPGCTARIFDLSVARWLAARWGSACPGGAARAPRGALAPGLRQSEAVPAPLPPRVADAAGASGKRSGRRARSCPSPMARAARVAVAAVGPHAGHRTRRLAGRGREGRAALAAGAQLPAIGDARRHLVSRKRPSEMGFDPACGRRVFRRRGCGQAVPPLWFPGLLLAPSWPDGRPGRRAHLKFALLYGEGKFESPEGKYFAKRQARIRGWTQEDPEASGTSSNRARSEPSVLTVAGILQTESRKTAKDICKIRCLCEEKENVLNINCENKGFTTVSLLQPPQYRIYQLFLNGNLLTRLYPNEFVNYSNAVTLHLGNNGLQEIRTGAFSGLKTLKRLHLNNNKLEILREDTFLGLESLEYLQADYNYISAIEAGAFSKLNKLKVLILNDNLLLSLPSNVFRFVLLTHLDLRGNRLKVMPFAGVLEHIGGIMEIQLEENPWNCTCDLLPLKAWLDTITVFVGEIVCETPFRLHGKDVTQLTRQDLCPRKSASDSSQRGSHADTHVQRLSPTMNPALNPTRAPKASRPPKMRNRPTPRVTVSKDRQSFGPIMVYQTKSPVPLTCPSSCVCTSQSSDNGLNVNCQERKFTNISDLQPKPTSPKKLYLTGNYLQTVYKNDLLEYSSLDLLHLGNNRIAVIQEGAFTNLTSLRRLYLNGNYLEVLYPSMFDGLQSLQYLYLEYNVIKEIKPLTFDALINLQLLFLNNNLLRSLPDNIFGGTALTRLNLRNNHFSHLPVKGVLDQLPAFIQIDLQENPWDCTCDIMGLKDWTEHANSPVIINEVTCESPAKHAGEILKFLGREAICPDSPNLSDGTVLSMNHNTDTPRSLSVSPSSYPELHTEVPLSVLILGLLVVFILSVCFGAGLFVFVLKRRKGVPSVPRNTNNLDVSSFQLQYGSYNTETHDKTDGHVYNYIPPPVGQMCQNPIYMSRKGRETQXAYLPKPGKEFQLLGNLEEKKEEPATPAYTISATELLEKQATPREPELLYXNIAEPSQGTSQRRPXSTITFVPYLKGQCCPFPMEFSDGQNQGQDSIKTVLYGTPRKCFVGQSKPNHPLLQAKPQSEPDYLEVLEKQTAISQL

SEQ ID NO: 689 - protein, 140 aa, Homo sapiens
LFWSPQTQREPTMVLSPADKTNVKAAWGKVGAHAGEYGAEALERHFDLSHGSAQVKGHGKKVADALTNAVAHVDDMPNALSALSDLHAHKLRVDPVNFKLSHCLLVTLAAHLPAEFTPAVHASLDKFLASVSTVLTSKYR

SEQ ID NO: 690 - protein, 370 aa, Homo sapiens
MRDDFREAALRPEKKSAKREAEVLKKMGKQEKERSKRNIIGYFEQKDSDNYRVFERVANILHDDCAFLSAFGDVSKPERYSGDNIIYKPPGHSAPDMVYLGAMTNFDVTYNWIQDKCVPLVREITFENGEEPSETIRDKSLTHSTEAPSGGSDFIMQELEQKEEAAGEEANDGGSGHSLGQEGRPRAQRTQWTGAESPMGKEVLDDGRRAGPVPAASACPCHGPQRYHASCRLPILTRPQMLPSAPGAESPRPEKPVSGENGRISPEGLIRSHGVGASPSPRSPGVSVSRASGPGGSLNRKRPSIDLAFLPTLSIWEECEVDRCWGCVTLTGSRSLKRCPGWQIPLLWLDAIGWEPRTGDWFGFHWENRV

SEQ ID NO: 691 - protein, 286 aa, Homo sapiens
  misc_feature (1)...(286): Xaa = any amino acid or nothing
AQEIFFKSIFSPNISRGSSAGFDRHITIFSPEGRLYQVEYAFKAIXPGGPLPSLAVRGKDWAVIVTQKKSTXPNYLDSSTVTSLFPRXLKNIWCVMTGMTADSRSRVQRARYKASYWKYTKYGYEIPVTMLCKGIARYCSGLHTRNAENEALLGCGMILIGYSXRSQGPSGYIRCDPAGYYCGFKSPTAAGSXNKPEVTPASLEKKKXRKEIWIGTFXTRPVETANYIACSTVLIQLISQPSEIEVGVVTVENLKFRILTEAEIDAHLGCSRQRETKHCLLVYRDP

SEQ ID NO: 692 - protein, 69 aa, Homo sapiens
EPKPEITWWFEGEILQDGEDYQYIERGETYCLYLPETFPEDGGEYMCKAVNNKGSAASTCILTIETDDY

SEQ ID NO: 693 - protein, 137 aa, Homo sapiens
  misc_feature (1)...(137): Xaa = any amino acid or nothing
KCKKYQENISESSQVCFNIYLLIICKLPNWSYVFSWXLIYIYIFEMEFHSSHRLECSGTISAQCALHLLGSSDSPASTSRVVGTTGVCHHAWTVLGFFVFLVETGFCHSDQANLEPLTXVIRQPWPPKVLGLFEVRS

SEQ ID NO: 694 - protein, 208 aa, Homo sapiens
  misc_feature (1)...(208): Xaa = any amino acid or nothing
RLFHSNQTVDHSQKNVDITLKGTPQXSCKGPRGNLCGRDFIHINVEPQPFLEKXKKRLPGLTKWWGNRKGNWPTRSGLFGSHVQDHDPRGVTTGASVTKMRVLCMPHLPPIQPLVYPQENGSSLLKSRNFLGXKNYIGRVRMETRVLLCSVSQGQKDELILKGNDIELVSNSAALIQQAPPVKNKDIRKFLDGIXVSEKGTVQPGLIE

SEQ ID NO: 695 - protein, 475 aa, Homo sapiens
  misc_feature (1)...(475): Xaa = any amino acid or nothing
GSAHIRSPGSPARHRASLPAPRRPQPASKDQCGMSAPGAYTGVNFEGALFSGYAPDGGLFMPEELPQLDRETLCQWSTLSYPGLVKELCALFIGSELLPKDELNDLIDRAFSRFRHREVVHLSRLRNGLNLLELLHGVTYAFKDLSLSCTTQFLQYFLEKREKHVTVVVGTSGDTGSAAIESVQGAKNMDIIVLLPKGHCTKIQELQMTTVLEENVQCLGVEGNSDXASIEPIKTVFADVAFVKKHNLMSLNSINWSRVLVQMAHHFFAYFQCTPSLDTHPLPLVEVVVPTGAAGNLAAGYIAQKIGLPIRLVVAVNRNDIIHRTVQQGDFSLSEAVKSTLASAMDIQVPYNMERVFWLLSGSDSQVTRSLMEQFERTQSVNLPKELHSKLSEAVTSVSVSDEAITQTMGRCWDENQYLLCPHSAVAVNYHYQQIDRQQPRYRQWVAWATEGPFEFQGPSSSPSSGRDRTTKKWL

SEQ ID NO: 696 - protein, 426 aa, Homo sapiens
  misc_feature (1)...(426): Xaa = any amino acid or nothing
MRAVSLLVLVLGVTMSYVMPWPQTENYTIYFPGSEAFKLGRAISSLPSIQYPGSSAYRWPVMELLSLYNYARRALMGNLANVIPWGWSEKMTIEYLNPGTGELLNNSRGDAPHSEHVHHRRVPRAGNAAASDCCVGAAAPPGQDRRGGASGVGKTGSRCPLGVGLAVVYATRLLPQTGETRIKNGQAAFWGHRHRRHQNFGVFEPLQCLAQKGELVKLAPLGGLEALVVRFLTKRFIGDYERNAGNLYTRQVQIEGETLALQVQDTPGFRSMRTAXAAVNSLIXCIGCAHAGGMGYSITDYKSYELISQLHQHVQKLHLGTRLPVVVAANKADLLHIKQVDPQLGLQLASMLGCSFYEESVSENYNDVYSAFHVLCKEVSHKQQPSSTPEKRRTSLIPRPKSPNMQDLKRRFKQALSAKVRTVTSV

SEQ ID NO: 697 - protein, 66 aa, Homo sapiens
  misc_feature (1)...(66): Xaa = any amino acid or nothing
MQLXXVVPPPLLXPGPLQFLIQRSRGHHAPPAXASSRPGQDDXXXTCGAXLLRPRGHFLRAAXVPN

SEQ ID NO: 698 - protein, 1222 aa, Homo sapiens
  misc_feature (1)...(1222): Xaa = any amino acid or nothing
MGCTPSHSDLVNSVAKSGIQFLKKPKAIRPGCQGGSERGSIPLLVKNSTCYDAGEGLAEEQPSPRRNQTTAKGLCQLMGDPASGKRKDMEGLIPGTKTSSSQLNKSQSHMAKDIPFKTQGSHGSQGADFSGDESEESSTQDTSKWKRTAKCHTSSTQSHCYQTIHPAHEPEGKVDFPEPLVKAHQQAYTYLHSSLSKYEAILCIIHQATQTRELLQPMVSFLLLCFEEISQLLGEISKDGEVLLQEVREDLAWPLKKREPQEQPNLLQQLLQYTVSKLQVLNGTVASLTGSFLEGSSSYLHSTATHLENKLSTKRNVDERLLRALRQLESLASGCGDPGVQGLPLCSEDSGIGADNESVQSVDKLGKQTSWDLAPEPEEWKSVTSPHTEARQSGHTWQQSPFCLGSGRPQDCLLSGAPMAKVQPRAQDEARSPCLSSTSPENITSPPLKLGTSTPCDSFGIGVSVEPHLSKTSRPMDASSLSDSEDSSPEEEEEDKMSSMSLCAWQEKTPHSRPQSSPADRESPFQARTRRLRSLQAQEMILKMKESISERIKFVPVPCGHQDWSEEEEGRTVVPPRPSTVSGSRRAPERQTRSQSESCLQSHVEDPTFQELRRVQRDLSQKLEAFYALGAKGQGQSQEQILQPRAAAVWPNGTCRVSPSNTTSRLKASLTKNFSILPSQDKSILQKCNPHPEDEQGKAGKLPNAIPSGEVSEAAKATDWNVRGCPTRTSVKKLIETFSPTESLRMLGDSKDAGASPCLRNCIMPPRFPKYTGLAPLYPKPQISPASGRESPQNGHRLEALSTYLSPSAXSRSSQEXGAQLXNGGEPRAPPSPPMEVLMDKSFASRSPQKAASPQRTPPRKPRSQGRERLAPPGEHGLPQSXGPLXAPWTCCPARAPPAXPSLTAQGQGVAGAAASPGSQPWTXAAHQPPAKAPRXRVGLGVRQRRPPASTGSPGRPSPGTTPAPIWTKQDLRVQPGQTKAEPKRSPPVGRKASPTRTHWVPQADKRRRSLPSSYRPAQPSPSAVQTPPSPPVSPRVLSPPTTKRRTSPPHQPKLPNPPPESAPAQCKVPSPPTQHPEASPPFSIPSPSPPMSPSQEHKETRDSEDSQAVIAKVSGNTHSIFCPATSSLFEAKPPLSTAHPLTPPSLPPEAGGPLGNPAECWKNSSGPWLRADSQRRAALCALNPLPFLRRTASDRQPGGRPQPPTLDPTSTSYESQLGQNR

SEQ ID NO: 699 - protein, 131 aa, Homo sapiens
CEGNSTCSENEVCVRPGECRCRHGYFGANCDTKCPRQFWGPDCKELCSCHPHGQCEDVTGQCTCHARRWGARCEHACQCQHGTCHPRSGACRCEPGWWGAQCASACYCSATSRCDPQTGACLCHAGWWGRS

SEQ ID NO: 700 - protein, 283 aa, Homo sapiens
  misc_feature (1)...(283): Xaa = any amino acid or nothing
LNLSCADVVWHQMDENLLATAATNGVVVTWNLGRPSRNKQDQLFTEHKRTVNKVCFHPTEAHVLLSGSQDGFMKCFDLRRKDSVSTFFGQSESVRDVQFSIRDYFTFASTFXERAMLQLWDIRRPDRCERMFTAHNGPVFCCDWHPEDRGWLATGGRDKMVKVWDMTTHRAKEMHCVQTIASVARVEWRPECRHHLATCSMMVDYNIYVWDVRRPYVPAACLRHRTSHGIAWRTPRPSSVFGQTVVASLFGAAAGRAPGPCTPWDCSRKNPGRWGSYLDGPPF

SEQ ID NO: 701 - protein, 283 aa, Homo sapiens; identical to SEQ ID NO: 700
  misc_feature (1)...(283): Xaa = any amino acid or nothing

SEQ ID NO: 702 - protein, 63 aa, Homo sapiens
NGPMCFVKQLEIPQYGYRNNVPTTTPRSNLAKELEKYSKTSFEYTINDNHTYGGLGCMRPRLV

SEQ ID NO: 703 - protein, 189 aa, Homo sapiens
MPQQVQNHGNRNSLSDHSAIKLELRIKKLTQNHTITWKLNNLLLNDYWINNEIKVEINKFFDTNKNKDTTYQNLWDTGFPISKPDGLSQLEQDLQVFDLETKTREVLRDDFSEFRQITISKEAFTSEKNNECNKPEKSFSLDSTIDADQKVLRIQNTDDNDKNDMSFSQNSASGKHEHINLTQDFQSSI

SEQ ID NO: 704 - protein, 137 aa, Homo sapiens
ILVLESLAFKEAWGNGGKVRIDSDRILRWAELTSGRGHSVLIYLTCVQDGQAMLWDLNEGKHLYTLDGGDIINALCFSPNRYWLCAATGPSIKIWDLEGKIIVDELKQEVSVQQQADHPRHLLPVCDAKLCCATRHL

SEQ ID NO: 705 - protein, 151 aa, Homo sapiens
RAGQEFQAHKAILAARSPVFSAMFEHEMEESKKNRVEINDVEPEVFKEMMCFIYTGKAPNLDKMADDLLAAADKYALERLKVMCEDALCSNLSVENAAEILILADLHSADQLKTQAVDFINYLGAGPRISQRWYFGDTCLHLTEQNKSSGA

SEQ ID NO: 706 - protein, 113 aa, Homo sapiens
RETGLPALGTCAVPLARAAPILQRLQQSPRTSLKARPKTRITGALPMDHTEGSPAEEPPAHAPSPGKFGERPPPKRLTREAMRNYLKERGDQTVLILHAKVAQKSYGNEKRFF

SEQ ID NO: 707 - protein, 99 aa, Homo sapiens
KHFKMRKIDLCLSSEGSEVILATSSDEKHPPENIIDGNPETFWTTTGMFPQEFIICFHKHVRIERLVIQSYFDLVHTEGQLQNEEIVAPIPNYGSTGHL

SEQ ID NO: 708 - protein, 99 aa, Homo sapiens; identical to SEQ ID NO: 707

SEQ ID NO: 709 - protein, 92 aa, Homo sapiens
  misc_feature (1)...(92): Xaa = any amino acid or nothing
VFSCGGCWSVTVKMLRNLLALRQIGQRTISTASRRHFKNKVPEKQKLFQGTAYAIYELAVASFPNEAGVTSVIPAIAWFSFIQLSMDQXSDK

SEQ ID NO: 710 - protein, 192 aa, Homo sapiens
APAEFRTSGEAAGSGERREQPSVTERVPTALGVPRMCVAQVLTAHLLPPRQALGSLCSPWAAPRVGPLPPAPAMVRISKPKTFQAYLDDCHRRYSCAHCRAHLANHDDLISKSFQGSQGRAYLFNSVVNVGCGPAEERVLLTGLHAVADIHCENCKTTLGWKYEQAFESSQKYKEGKYIIELNHMIKDNGWD

SEQ ID NO: 711 - protein, 34 aa, Homo sapiens
LPSGILVQTAARTVMMAPDAPSDGPYLPVATLPT

SEQ ID NO: 712 - protein, 200 aa, Homo sapiens
  misc_feature (1)...(200): Xaa = any amino acid or nothing
SPAASGGFRAGPRNQDPSRALAELWPTKAVSVLKGDGPVQGIINFEQKESNGPSEGWGKHLKGLTEGLHGFHVHEFGDNTAGCTSAGPHFIPLSRKHGGPKDEERHVEDLGQCXLLDKDGVGPMCLLKDSVIFTLQGDHLHHLGRTLVVPWKKPDDLGQRVGNEESSKTGNAGKFVWACGVNLGSAPNKHSPWDVVLRPP

SEQ ID NO: 713 - protein, 118 aa, Homo sapiens
GTRWRPGSMAGLELLSDQGYRVDGRRAGELRKIQARMGVFAQADGSAYIEQGNTKALAVVYGPHEASGRAGWGIVWPWELRGSRAERWLGDLRGNGRRASVYTADAQHRISLGVNASP

SEQ ID NO: 714 - protein, 262 aa, Homo sapiens
EDTGGIHMEEAPETYIPSRAVSLFFNWKQEFRTLEVTLRDFSKLNKQDIRYLGKIFSSATSLRLQIKRCAGVAGSLSLVLSTCKNIYSLMVEASPLTIEDERHITSVTNLKTLSIHDLQNQRLPGGLTDSLGNLKNLTKLIMDNIKMNEEDAIKLAEGLKNLKKMCLFHLTHLSDIGEGMDYIVKSLSSEPCDLEEIQLVSCCLSANAVKILAQNLHNLVKLSILDLSENYLEKDGNEALHELIDRMNVLKQLNALELPLGL

SEQ ID NO: 715 - protein, 232 aa, Homo sapiens
  misc_feature (1)...(232): Xaa = any amino acid or nothing
DSSNLVPFSGFTSNSSSLAVSTTSTVTSYNEILKLSVIKVRINFFQTPVNVAILISFHETSVFLLASRMLNSFQKIFSLPRFWIWAKRPGILPNICNAQESSSPTKDXQRKWFLEMRSTPGEDAANNVEMTTKDLNYDRNLVDKAVVGFERTDSNFERSCTVGNSIAXYREIVHGKKSTWMQQTSLLSYFKKLPQPLHPSATTTLVYXKPSISRQDSPPTKRLXLTDGSDDH

SEQ ID NO: 716 - protein, 988 aa, Homo sapiens
MRRDPTPPRGLPRQRPTPSPRTRSRGHQSQRPKAKSEPQPAPAATPGGRRAWEPRAQAGCPPPPRAASPRRLVQGERPESGNRSRQAAYPRRASRARTCTTRLPPTLRQRALTQRPCSVPRTNRKLRRGPGPITLRRPESCSRPAFATEAHDAQALPRPPGVIARQSAMHRALAALKNKPLNHVHKVVKERLCPWLCSRQPEPFGVKFHHAHCKKFHSKNGNDLHPLGGPVFSQVSDCDRLEQNVKNEESQMFYRRLSNLTSSEEVLSFISTMETLPDTMAAGALQRICEVEKKDGDQGLPKEILENSIFQALCFQFEKEPSQLSNTSLVTALQALILLHVDPQSSLLLNLVAECQNRLRKGGMEVRNLCILGESLITLHSSGCVTLELIINQLQGEKLETFTPEDIVALYRILQACTEKVDEHQTFLNKINNFSLSIVSNLSPKLISQMLTALVVLDQSQAFPLIIKLGKYVVRHVPHFTNEELRRVLEAFIYFGHHDTFFTKALEHRVAAVCLTLDPEVVCRVMEYCSRELILSKPILNAVAETFVCQTEKFSPRQISALMEPFGKLNYLPPNASALFRKLENVLFTHFNYFPPKSLLKLLHSCSLNECHPVNFLAKIFKPLFLQRLQDVEIKLDEEGFVLPSTANEDIHKRIALCIDGPKRFCSNSKHLLGKEAIKQRHLQLLGYQVVQPLLILSHLALPYPLHVRIQQTVLITLGTLNAPALGPNRKEPLPLRGLKQGSSDTKEARHSRGDCEALGQWSYKFRSQQLKERASTEQTGASDETCLHVDPLGQFFKASPGPSERFMTIHQLPSAVTWAGALDGGGMEDDEEETTASTLRGKPRPPPVSAQSAFSYIPPRRLDPKEHSYYYRPARVKKVFASPLLSAMITGIISLYDCIFKRRLDYDQKLHRDDREHAKSLGLHVNEEEQERPVGVLTSSVYGKRINQPIEPLNRDFGRANHVQADFYRKNDIPSLKEPGFGHIAPS

SEQ ID NO: 717 - protein, 121 aa, Homo sapiens
  misc_feature (1)...(121): Xaa = any amino acid or nothing
GDSGGSPWPDEKPKEGVKTENNDHINLKVAGQDGSVVQFKIKRHTPLSKLMKAYCERQGLSMRQIRFPIXPGNPINETDTPATVGKWKDEDTIDVFQQARPGGVYLKKGTCFLYSQNSVSF

SEQ ID NO: 718 - protein, 375 aa, Homo sapiens
  misc_feature (1)...(375): Xaa = any amino acid or nothing
ENSPLPKAVRGVRPRTSLIGRTSPLVTLFCLSWQRIKAAAAALGTALPRLCYPWLGGPAKQLLRAAPGRLAAKEASVLCRLQGGDQKAESTAGDAGASAVHQRSTDTLSSSVMASIIARVGNSRRLNAPLPPWAHSMLRSLGRSLGPIMASMADRNMKLFSGRVVPAQGEETFENWLTQVNGVLPDWNMSEEEKLKRLMKTLRGPAREVMRVLQATNPNLSVEIFLRAMKLGVFGGVXKQFXLSPWVNFFNTLTKLKGEKASLYVIRLEVQLQNAIQAGIIARKMQTGTRLQQLLLGGELSRDLRLRLKDFLRMYANEQERLPNFLELIRMVREEEDWDDAFIKRKRPKRSESMVERAVSPVAFQGSPPIVIGSA

SEQ ID NO: 719 - protein, 152 aa, Homo sapiens
NWAGTGHSLQQVTGHDHYNADLKPIDGFNGRFGYRRNTPALRQSTSVFGERPDRMVSVLNRKLSAEELERKRQEMMENAKWREEERLNILKRHAKDEEREQRLEKLDSRDGKFIHRMKLESASTSSLEDRVKRNIYSLQRTSVALEKNFMKR

SEQ ID NO: 720 - protein, 152 aa, Homo sapiens; identical to SEQ ID NO: 719

SEQ ID NO: 721 - protein, 96 aa, Homo sapiens
  misc_feature (1)...(96): Xaa = any amino acid or nothing
NVDLLIPNSSITLLSDRPASILLRTFIFSSKFSVVYFPLLFILNLTLNHQQEKTKGKALMNWQKKKPTFFKQNLAESPKRHGHCIGGXWTEGANHD

SEQ ID NO: 722 - protein, 299 aa, Homo sapiens; identical to SEQ ID NO: 290

SEQ ID NO: 723 - protein, 246 aa, Homo sapiens
  misc_feature (1)...(246): Xaa = any amino acid or nothing
ARSCRAALSEASAGRPLPPFPGRAKETCRAAAMEAIWLYQFRLIVIGDSTVGKSCLIRRFTEGRFAQVSDPTVGVDFFSRLVEIEPGKRIKLQIWDTAGQERFRSITRAYYRNSVGGLLLSDITNRSSFQNVHASWQEPKLHVQPYQIVLVLVGHKCDLDTQRQVTRHEAEKLAADTAMKYIETSARDAINVEESPSQTXPRDIYELVKRGEITIQEGWEGVKSGFVPNVVHSSEEVVKSERRCLC

SEQ ID NO: 724 - protein, 47 aa, Homo sapiens
LKNKKNIYFCKLSECRDVLYNPNTVQISSPKRNEQGKTEKELYQMCS

SEQ ID NO: 725 - protein, 114 aa, Homo sapiens
  misc_feature (1)...(114): Xaa = any amino acid or nothing
PRSVPSRFSGGRTHEGREGAQAXGEASNPGNPRRGQGSGGGTXGDSSKGERKQDRNKEKKEALSKVVIRRLPPTLTKEQLQEHLQPMPEHDYFELFSNDTRLYAHMDARSLHQL

SEQ ID NO: 726 - protein, 335 aa, Homo sapiens
IRHEEIIKVTPLQQMLASCTGAILTSVIVTPLDVVKIRLQAQNNPLPKGKCFVYSNGLMDHLCVCEEGGNKLWYKKPGNFQGTLDAFFKIIRNEGIKSLWSGLPPTLVVAVPATVIYFTCYGQLSALLRSKLGENETCIPIVAGIVARFGAVTVISPLELIRTKMQSKKFSYVELHRFVSKKVSEDGWISLWRGWAPTVLRDEPFSAMYWYNYGILKKWLCEKSGLYEPTFMINFTSGALSGSFAAVATLPFDVVKTQKQTQLWTYESHKISMPLHMSTWIIMKNIVAKNGFSGLFPGLIPRLILKLAPACAIMISTYEFGKAFFQKQNVRRQQY

SEQ ID NO: 727 - protein, 1186 aa, Homo sapiens
MLHHPSQGFRFGTVRESSAEDYVRQSFPEMHEYMRRYNVPATPDGVEYLKNDPEKLDAFIMDKALLDYEVSIDADCKLLTVGKPFAIEAFFFLLSQERGADEARFRTFVDSWPYTTAHDMDSLEFSDPSHHLDCPLGKTLNLYPCGFSWNSCKLQGLPLHGMKCEVHLGPVNSFQDSQGVPLPGTRNTCFPGVDHLTSFTGKRLSSSAKMSGIGNKRAAGEPGTSMPPEKKAAVEDSGTTVETIKLGGVSSTEELDIRTLQTKNRKLAEMLDQRQAIEDELREHIEKLERRQATDDASLLIVNRYWSQFDENIRIILKRYDLSRAWETYSQNEKPLCVPEPEPDSDSNQERKDDRERGKWEGQEPAFSFLATLASSSSEEMESQLQERVESSRRAVSQIVTVYDKLQEKVELLSRKLNSGDNLIVEEAVQELNSFLAQENMRLQELTDLLQEKHRTMSQEFSKLQSKVETAESRVSVLESMIDDLQWDIDKIRKREQRLNRHLAEVLERVNSKGYKVYGAGSSLYGGTITINARKFEEMNAELEENKELAQNRLCELEKLRQDFEEVTTQNEKLKVELRSAVEQVVKETPEYRCMQSQFSVLYNESLQLKAHLDEARTLLHGTRGTHQHQVELIERDEVSLHKKLRTEVIQLEDTLAQVRKEYEMLRIEFEQTLAANEQAGPINREMRHLISSLQNHNHQLKGEVLRYKRKLREAQSDLNKTRLRSGSALLQSQSSTEDPKDEPAELKPDSGTYPPSPQPQRHLRRMPMKSSLNGMKKNENEKGGRRRGNEKETREKEKEREREKQKLKESEKERDSAKDKEKGKHDDGRKKEAEIIKQLKIELKKAQESQKEMKLLLDMYRSAPKEQRDKVQLMAAEKKSKAELEDLRQRLKDLEDKEKKENKKMADEDALRKIRAVEEQIEYLQKKLAMAKQEEEALLSEMDVTGQAFEDMQEQNIRLMQQLREKDDANFKLMSERIKSNQIHKLLKEEKEELADQVLTLKTQVDAQLQVVRKLEEKEHLLQSNIGTGEKELGLRTQALEMNKRKAMEAAQLADDLKAQLELAQKKLHDFQDEIVENSVTKEKDMFNFKRAQEDISRLRRKLETTKKPDNVPKCDEILMEEIKDYKARLTCPCCNMRKKDAVLTKCFHVFCFECVKTRYDTRQRKCPKCNAAFGANDFHRIYIG

SEQ ID NO: 728 - protein, 36 aa, Homo sapiens
PLNFRPIFPVIFGISCSRIFKQVFRACVRPSHSDFL

SEQ ID NO: 729 - protein, 331 aa, Homo sapiens
MAATPPHRAGPNPCRHSRHLSEGREETRTHPHSPHTHGGGVEGPAPPASRLQRDKVTHPGARQRAGCALTRARRPRASDAGSSSSSRRRRRRHLRPSTSADGGRERVAALKRVLYLVWAFIPESWLNSLGLTYWPQKYWAVALPVYLLIAIVIGYVLLFGINMMSTSPLDSIHTITGHERNTNVLQTMGSSVFEGHDQFSVTVTGDPMARAGRSQLEPHSDSDATLQLHCSQPTCVIKPVYTKPSILEAAVSQPASAAAAAPRGPSLPVILWFLRQPLLNVLSECTMGGHILGKVQSLTPHHHSVKDLRTWQELKCSVYLIADGARFSSAA

SEQ ID NO: 730 - protein, 113 aa, Homo sapiens
  misc_feature (1)...(113): Xaa = any amino acid or nothing
LWPLGPEPRAGCICRGNLSSTRGTSTRPGATADFGLHHGGLPAGLSSCSAGVPTSTCCAGKXNLXFGLPRGCSCPGFLPSKGTIILDCVNKDLKNGKATPKDSKYVEKLKALF

SEQ ID NO: 731 - protein, 112 aa, Homo sapiens
EDEKVERVPSPDHRRRSYRDLDKPRRSPTLRYRRSRSRSPIRRSRSPKRRSPFPRRERHRSKSSRRHRSRSRDRRHRSRSKSPGHHRSHRHRSHSKSPERSKKSHKISRSRE

SEQ ID NO: 732 - protein, 36 aa, Homo sapiens
  misc_feature (1)...(36): Xaa = any amino acid or nothing
MHRRLVASPXSVYVRQSVHMLVCFPMASDKXLNKYL

SEQ ID NO: 733 - protein, 341 aa, Homo sapiens
EETSGHCVVVGPAAKRFSAGCFPRFPRPVPRALLIAPGPSVSARLTVGCDDMSNKEGSGGFRKRKHDNFPHNQRREGKDVNSSSPVMLAFKSFQQELDARHDKYERLVKLSRDITVESKRTIFLLHRITSAPDMEDILTESEIKLDGVRQKIFQVAQELSGEDMHQFHRAITTGLQEYVEAVSFQHFIKTRSLISMDEINKQLIFTTEDNGKENKTPSSDAQDKQFGTWRLRVTPVDYLLGVADLTGELMRMCINSVGNGDIDTPFEVSQFLRQVYDGFSFIGNTGPYEVSKKLYTLKQSLAKVENACYALKVRGSEIPKHMLADVFSVKTEMIDQEEGIS

SEQ ID NO: 734 - protein, 84 aa, Homo sapiens
MDHEFVAKGHLFRKGIMKIMVYKIFRILVPGNTDSTEALSLSYLVELSVVAPAGQDMVSDDMKNFAEQLKPLVHLEKIDPKRLM

SEQ ID NO: 735 - protein, 133 aa, Homo sapiens
PRVRGILPSCSVVVFSLLLLLLLRLGEPSWGRMVCEKCEKKLGTVITPDTWKDGARNTTENGGRKLNENKALTSKKARFDPYGKNKFSTCRICKSSVHQPGSHYCQGCAYKKGICAMCGKKVLDTKNYKQTSV

SEQ ID NO: 736 - protein, 54 aa, Homo sapiens
VIPQIQKVCEVVDGFIYVANAEAHKVQDTEAETLTGFLNGIEWILEEVESKRAR

SEQ ID NO: 737 - protein, 161 aa, Homo sapiens
ESGQVKLRPVSSASRGLRPAKPRRTTMLKAKILFVGPCESGKTVLTNFLTESSDITEYSPTQGVRFEPCWPALMKDAHGVAIVFDADIPSHRKELEMWDSCFCQQPSLQDTQCMLIAHHKPSSGDDKGSLSLSPPLNKLKLVHSNLEDDPEEIRMEFIKYL

SEQ ID NO: 738 - protein, 263 aa, Homo sapiens
MGFRHVGQAGLKLLTSSDLPALASQVQCKLVVPASAERHISPLQRGLIAFSLRPDPGLAGDRASLGVPLCGYRIGNPRRSPKRTRHCARTAAVSCSAYSKCLYQFRPNVGHSASTPKAMCQTTAAGEGAHAADEGYTQRVVGARRGTPQRYTGGAETKNRAFRSYPKMETSWPRGGGSTPPVALDAQVERECALGSGAQGKHSCLAVRVVLIFCINEHYPQTLTYRLPFVLPLRSGGTPTSWRALFFPSSSDSNCKLCGGTSS

SEQ ID NO: 739 - protein, 59 aa, Homo sapiens
SRRRGGVSAPTSFYGRDRRMFPAQEEADRTVFVGNLEARVREEILYELFLQCCSFLTMK

SEQ ID NO: 740 - protein, 525 aa, Homo sapiens
HGDVSPRCLFKEGSAAQLQTLELAGSLHLSAPSGSAKATKVESLQSRIYIHLLVVLMAVTACLEQLLRGCQLQYGRRGQSCPLLRDSGRQEHARAPSPTTSARRETHVPGHSCSRPAAALHPAIPALLGAQETPCPCRLKVPAPEVAVHSMSASAPAAEGEGTPTQPASEKDPEMPGPREESEEEEDEDDEEEEEEEKEKSLIVEGKREKKKVERLTMQVSSLQREPFTIAQGKGQKLCEIERIHFFLSKKKTDELRNLHKLLYNRPGTVSSLKKNVGQFSGFPFEKGSVQYKKKEEMLKKFRNAMLKSICEVLDLERSGVNSELVKRILNFLMHPKRSGKPLPKFKKSCSKGSKKDRNSSGMASKAKRTKCPEILSDESSSDEDEKKNKEESSDDEDKESEEEPSKKTVKREKPKQRATSKSKKSVKSANVKKADSSTTKKNQNSSKKESESEDSSDDEPLIKKLKKPPTDEELKETIKKLLASANLEEVTMKQICKKVYENYPTYDLTERKDFIKTTVKELIS

SEQ ID NO: 741 - protein, 72 aa, Homo sapiens
SRSAAHCCHGGTKMAALAYNLGKREINHSCMMHKYKISEAKNCLVDKHIAFIGDSRIRQLFYSFVKIINPQF

SEQ ID NO: 742 - protein, 72 aa, Homo sapiens; identical to SEQ ID NO: 741

SEQ ID NO: 743 - protein, 230 aa, Homo sapiens
SLPRRLESPGRLAMAARGVIAPVGESLCRYAEVPCSPSAKRPDADVDQQRLVRSLIAVGQGVAALAFAGRYALRIWKPLEQVITETAKGRFQTPSFSSYYKGGFDQKMSRREAGLILGVSPSAGKAKIRTAHRRVMILESPQIKGGSPYVAAKINEAKDLLETTPPTLMLKDHTEGKKNEGTSKKKKSPAKYSKTWSFLIFYMGFDHSLIFRPLSCITNKMLIVLLFIIF

SEQ ID NO: 744 - protein, 244 aa, Homo sapiens
ARGNLNHHPGAAVVAPCVRLVPCSLLVLALSLRPSPRVLHTATKQKNSCQHLEEDVDQTKWRTDTPSMDKILMEEVKLEEQLKEAVEEDKQALADTEGSEQSSQKLVEEGNMYSIQGFCKDSLEVADVLEKATQCVPEEEIKDNNPHLKNLSLWDHLVAGKEGQDSQSFYIMSMEKLSSTKLVPAPPKIGDRCTQHREKNKKLKSLPLSPQPRCLTPLSLMQQEAPGERFSPILYFCHVLITVW

SEQ ID NO: 745 - protein, 38 aa, Homo sapiens
CGQVHMANKWQTEEVSPPSALLVVAGPMPLLPRTPLSS

SEQ ID NO: 746 - protein, 217 aa, Homo sapiens
MLQQDSNDDTKDVSLFDAEEETTNRPRKVKIRHPVASFFHLFFRVSAIIVCLLCELLSSSFITCMVTIILLSCDFWAVKNITGRLMVGLRWWNHVDEDGKSHWVFESRKESSQENETVSEAESGIFWLGLVACPVLWVILAFSARFSFRVKKWLAVVIVGVVLQGANLYGYLRCKVPSVRIESLDTQLGIQNWRIGWYEGKAHTSGVRSVGNRNRSE

SEQ ID NO: 747 - protein, 231 aa, Homo sapiens
GHRPTWLAFPLLNGVCCSCPLRALFPGILDFRVGQQAGKMLSSIKCVLVGDSAVGKTFLVVRFTSRTLREGYSPPVYENTGVDVFMDGIQISLGLWDTAANDAFRSIRPLSYQQADVVLMCYSVANHNSFLNLKNKWIGEIRSNLPCTPVLVVATQTDQREMGPHKASCVNALEGKKLAQDVRARGYLECSALSNRGVQQVFECAVRETAVNQARRRNRRRLFSINECKIF

SEQ ID NO: 748 - protein, 53 aa, Homo sapiens
SLRGEQLRPWAPGDLSVMSFRDLRSKAAPRPCDLRVFQRFRAPARRVPCVGDP

SEQ ID NO: 749 - protein, 423 aa, Homo sapiens
GGSSVIFYGLICMYTLWWMLRASLKKYSFESIREESSYSDIPDVKNDFAFMLHLIDQYDPLYSKRFAVFLSEVSENKLRQLNLNNEWTLDKLRQRLTKNAQDKLELHLFMLSGIPDTVFDLVELEVLKLELIPDVTIPPSIAQLTGLKELWLYHTAAKIEAPALAFLRENLRALHIKFTDIKEIPLWIYSLKTLEELHLTGNLSAENNRYIVIDGLRELKRLKVLRLKSNLSKLPQVVTDVGVHLQKLSINNEGTKLILWYNHIAYIPIQIGNLTNLERLYLNRNKIEKIPTQLFYCRKLRYLDLSHNNLTFLPADIGLLQNLQNLAITANRIETLPPELFQCRKLRALHLGNNVLQSLPSRVGELTNLTQIELRGNRLECLPVELGECPLLKRSGLVVEEDLFNTLPPEVKERLWRADKEQA

SEQ ID NO: 750 - protein, 445 aa, Homo sapiens
RRGVSGARVRVAFQGNERGSKWAARGGARDAGGRGRSGLWKGPKLMRRAPAAERLLELGFPPRCGRQEPPFPLGVTRGWGRWPIQKRREGARPVPFSERSQEDGRGPAARSSGTLWRIRTRLSLCRDPEPPPPLCLLRVSLLCALRAGGRGSRWGEDGARLLLLPPARAAGNGEAEPSGGPSYAGRMLESSGCKALKEGVLEKRSDGLLQLWKKKCCILTEEGLLLIPPKQLQHQQQQQQQQQQQQQQPGQGPAEPSQPSGPAVASLEPPVKLKELLFSNMKTVDCVERKGKYMYFTVVMAEGKEIDFRCPQDQGWNAEITLQMVQYKNRQAILAVKSTRQKQQHLVQQQPPSQPQPQPQLQPQPQPQPQPQPQPQSQPQPQPQPKPQPQQLHPYPHPHPHPHSHPHSHPHPHPHPHPHQIPHPHPQPHSQPHGHRLLRSTSNSA

SEQ ID NO: 751 - protein, 60 aa, Homo sapiens
KMTEPGASPEDLWVKVEYAYSDNSLDPDPAGDCDWRPAPIEKPALLTGSWKPGEQPTRGP

SEQ ID NO: 752 - protein, 60 aa, Homo sapiens; identical to SEQ ID NO: 751

SEQ ID NO: 753 - protein, 60 aa, Homo sapiens; identical to SEQ ID NO: 751

SEQ ID NO: 754 - protein, 60 aa, Homo sapiens; identical to SEQ ID NO: 751

SEQ ID NO: 755 - protein, 559 aa, Homo sapiens
  misc_feature (1)...(559): Xaa = any amino acid or nothing
XKLSRECEIKYTGFRDRPHEERQARFQNACRDGRSEIAFVATGTNLSLQFFPASWQGEQRQTPSREYVDLEREAGKVYLKAPMILNGVCVIWKGWIDLQRLDGMGCLEFDEERAQQEDALAQQAFEEARRRTREFEDRDRSHREEMEVHELEKSKRALETQMEEMKTQLEELEDELQASEDAKLRLEVNMQALKGQFERDLQARDEQNEEKRRQLQRQLHEYETELEDERNERALAAAAKKKLEGDLKDLELQADSAIKGREEAIKQLRKLQAQMKDFQRELEDARASRDEIFATAKENEKKAKSLEADLMQLQEDLAAAERARKQADLEKEELAEELASSLSGRNALQDEKRRLEARIAQLEEELEEEQGNMEAMSDRVRKATQQAEQLSNELATERSTAQKNESARQQLERQNKELRSKLHEMEGAVKSKFKSTIAALEAKIAQLEEQVEQEAREKQAATKSLKQKDKKLKEILLQVEDERKMAEQYKEQAEKGNARVKQLKRQLEEAEEESQRINANRRKLQRELDEATESNEAMGREVNALKSKLRGPPPQETSQ

SEQ ID NO: 756 - protein, 41 aa, Homo sapiens
  misc_feature (1)...(41): Xaa = any amino acid or nothing
LKRQANTFPILSXTKNTHNVAFLLGKTCFLYFTXECNITLP

SEQ ID NO: 757 - protein, 163 aa, Homo sapiens
GGIPRVFLYELLPESPFFLECNSFTSPDPHKGLVLLPKTECDVREVELMRCLRLRQSSLEPVAFRLPRVRKEFFQDDVFPDTAVIWEPVLSAEAWLQGANGQPWLLSLQPPDMSPGAPRDWVWGGSGMGVGERDRRPRLKFHSCWHAESSGLWEGGVAVSISL

SEQ ID NO: 758 - protein, 272 aa, Homo sapiens
MVPDERYITQEGHKLETGAPRPPATVTNAVSWRSEGIKYRKNEVFLDVIESVNLLQLEVTFFAGEKRFETETPTVSLTLSCGNPRLIVARATPPPFLEQLSQSKRSEAAIRAEIVFANRKCGTPATEALESVMEAYEQVQKGPLKLKGFAELGVTKRKKKKKDKDKAKLLEAMGTSKKNEEEKRRGLDKRTPAQAAFEKMQEKRVLICRNYRGDVDMSEVEHFMPILMEKEEEGMLSPILAHGGVRFMWIKHNNLYRIPLLGVLPGDSCVGV

SEQ ID NO: 759 - protein, 328 aa, Homo sapiens
TPAPAEAEQGKSQCPSGSTAQSWSAMDILVPLLQLLVLLLTLPLHLMALLGCWQPLCKSYFPYLMAVLTPKSNRKMESKKRELFSQIKGLTGPPGKVALLELGCGTGGNFQFYPPGCRVTCLDPNPHFEKFLTKSMAENRHLQYERFVVAPGEDMRQLADGSMDVVVCTLVLCSVQSPRKVLQEVRRVLRPGGVLFFWEHVAEPYGSWAFMWQQVFEPTWKHIGEGCCLTQKTWKDLEKAQFSENQRERQAPSLKGPTLWAPPSLERGCKKFFPRDGEQETGALQPDKGAYRSLRESGPTGAGLRNRSQLSVLPTGLQGHLPRPKSPL

SEQ ID NO: 760 - protein, 67 aa, Homo sapiens
QLPDPAIEDQGGEYVQPMLSKYAAVCVRCPGYGTRGPAKKPSAHSQSQASSSPEWIPELLPCPDAAA

SEQ ID NO: 761 - protein, 31 aa, Homo sapiens
  misc_feature (1)...(31): Xaa = any amino acid or nothing
FITSLGHRCLIYKISCQISKIAXNTFVSHLM

SEQ ID NO: 762 - protein, 97 aa, Homo sapiens
PTTLSDWLAGYVFLSSQLCGQCHTPSWTTTALACIFQCCFCQRGQQSHGSSRTSPELSEECPGEMVKMTKSKTFQAYLPNCHRTYSCIHCRAHLANH

SEQ ID NO: 763 - protein, 29 aa, Homo sapiens
MDSSIRGSLARLCKGLQACCYMFNWAPQV

SEQ ID NO: 764 - protein, 228 aa, Homo sapiens
ARGDASEFSKNPHIGSFVGNQVTIRKADGSLVHISITPYPAILHEYVSSSKWEDAVRLCRFVKEQTMWACLAAMAAANRDMTTAEIAYAAIGEIDKVQYINSIKNLPSKESKMAHILLLSGNIQEAEIVLLQAGLCYQAIQININLYHWERALELAVQHKTHVDTVLAYRQKFLETFGLQETNKRYLHYAKGLPIYWEKSKATIEMEITQEREHFLRSQSSKSIGLKP

SEQ ID NO: 765 - protein, 59 aa, Homo sapiens
EFLHMAPGEVTITVRLIRSFEHRNFKPVVYHGVNLDQTVKEFIVFLKQDALKIIHQAHK

SEQ ID NO: 766 - protein, 595 aa, Homo sapiens
EHDLHYAKLGTRATGGGGRGPSGHNVFLDEGGTPLLAESLVYQIFLSLGLADLLAAGLVCRQWQAVSRDEFLWREQFYRYYQVARDVPRHPAAMSWYEEFQRLYDTVPCVEVQTLREHTDQVLHLSFSHSGYQFASCSKDCTVNIWSNDLTISLLHSADMRPYNWSYTQFSQFNKDDSLLLASGVFLGPHNSSSGEIAVISLDSFALLSRVRNKPYDVFGCWLTETSLISGNLHRIGDITSCSVLWLNNAFQDVESENVNVVKRLFKIQNLNASTVRTVMVADCSRFDSPDLLLEAGDPATSPCRIFDLGSDNEEGWLCSPPAHAKEGLRHFLDRVLEGRAQPQLSERMLETKVAELLAQGHTKPPERSATGAKSKYLIFTTGCLTYSPHQIGIKQILPHQMTTAGPVLGEGRGSDAFFDRRLDHVIDIHGHIIGMGLSPDNRYLYVNSRAWPNGSVVADPMQPPPIAEEIDLLVFDLKTMREVRRALRAHRAYTPNDECFFIFLDVSRDFVASGAEDRHGYIWDRHYNICLARLRHEDVVNSVVFSPQGARRCCFTAKGHATIKSWRSPRTMGVLQAPRPRPRTFFSWLASQRR

SEQ ID NO: 767 - protein, 34 aa, Homo sapiens
  misc_feature (1)...(34): Xaa = any amino acid or nothing
MGSMVVGVVVSAFLFTPFFVFTGCGVAAMMGXVA

SEQ ID NO: 768 - protein, 110 aa, Homo sapiens
  misc_feature (1)...(110): Xaa = any amino acid or nothing
RRCKVRPSARGVLRYAVCVCVCVCVYPCVHVCTCVRMCLCVCVCVCEAQWRFTVGVRDVHAAFASSPKKGGALSRLWLCTVPPSSGGTGLSXXSSLWPGSDGISATTPCC

SEQ ID NO: 769 - protein, 33 aa, Homo sapiens
INPSTSHLPHSGAPEPWTMIHPFELFLVLKCVV

SEQ ID NO: 770 - protein, 61 aa, Homo sapiens
  misc_feature (1)...(61): Xaa = any amino acid or nothing
DADSMCELPSDLQQSCQHAVSDSDTQAWCPRRPGSLCGTGRRAPGSXGGSRVIDRGRPLAI

SEQ ID NO: 771 - protein, 61 aa, Homo sapiens; identical to SEQ ID NO: 770
  misc_feature (1)...(61): Xaa = any amino acid or nothing

SEQ ID NO: 772 - protein, 85 aa, Homo sapiens
STEQQRRSARRAGAHGPFPTASASAGPTPRGRGRPLFPGLRAEVDEFESCGPLNVAARGRRAPTYSGPGKVALRLWNFCPALLGE

SEQ ID NO: 773 - protein, 139 aa, Homo sapiens
YATLGTRQQIEVARQLIDEKVGGTNLGAPGAFGQSPFSQPPAPPHQNTFPPRSSGCFPNMAAKVNGNPHSTPVSGPPAFLTQGWGSTYQAWQQPTQQVPSHAASAAPQASSPPDYTMAWAEYYRQQVAFYGQTLGQAQA

SEQ ID NO: 774 - protein, 86 aa, Homo sapiens
  misc_feature (1)...(86): Xaa = any amino acid or nothing
SLGSPVLPGSGAAGVSTVAHSSAHXVEANWDSCQGGGLGSARAARRAPAVHWQQLHSGDWVPQIRTRALVHHHFRRPLLRPAHSQQ

SEQ ID NO: 775 - protein, 99 aa, Homo sapiens
  misc_feature (1)...(99): Xaa = any amino acid or nothing
IMGDAKNFLYAWCGKRKMTPSYEIRAVGSPNGHRFMPEGDVHGLGKCGMGNSTNKKDALSNAARDFVNYSGRINEIYMXEQGSAIGELSHMYISFIRPE

SEQ ID NO: 776 - protein, 159 aa, Homo sapiens
  misc_feature (1)...(159): Xaa = any amino acid or nothing
NFQAQTGRRALLRCFQTFYISIVDLCENGGKRPTTNSSASFTKEQADAIRRIRNSKDSWDMLGVKPGASRDEVNKAYRKLAVLLHPDKCVAPGSEDAFKAVVNARTALLKNIKXKVQKKATCGTQMQTDFPXRXNNQRGGFLPKNLTALFIHVLAFVYQ

SEQ ID NO: 777 - protein, 222 aa, Homo sapiens
  misc_feature (1)...(222): Xaa = any amino acid or nothing
TVCQHTQYKESRESGAFCRRAWGLSGGDKGKQKPMSRSPGLSPQASPQKSLLWGEQPCIGHRCTKLTVNPKPPQTSQAACPHPEPSGLPCMESHSQKSLFPESAIVARGHVFQQRLGSGPLCPLPTLSPKSRPPLTSLALHLGVPPSPRYGPRXEGLGMGEAQNAGEMRPGEPWGKPSQGPPTELALGFVSPTPFPSPLPPTHSGGPHQDSWAQCGSPTCLF

SEQ ID NO: 778 - protein, 77 aa, Homo sapiens
LLLYCGTNLGIPNSQEYFLLFGRQVGLQEQTDLLHFLQRQQRVADRVLKQHVQQHHGAICRVRGRVGRPGVPAQGPQ

SEQ ID NO: 779 - protein, 46 aa, Homo sapiens
  misc_feature (1)...(46): Xaa = any amino acid or nothing
LGPLPQGTFSPEGWRQPXPCGWPPCRAFMESSSLQKRMRSVLDPLE

SEQ ID NO: 780 - protein, 46 aa, Homo sapiens; identical to SEQ ID NO: 779
  misc_feature (1)...(46): Xaa = any amino acid or nothing

SEQ ID NO: 781 - protein, 44 aa, Homo sapiens
SSGRGGGPLGSLSSGWRCFWRLGAGHSVAPLTRLPYREGNLFAK

SEQ ID NO: 782 - protein, 44 aa, Homo sapiens; identical to SEQ ID NO: 781

SEQ ID NO: 783 - protein, 106 aa, Homo sapiens
MERFLMDGFQPQQLSTYALTLYKHTATVDGKTILVADINVTQKSFNFAKKFSLPLYFVSAADGTNVVKLFNDAIRLAVSYKQNSQDFMDEIFQELENFSLEQEEEN

SEQ ID NO: 784 - protein, 106 aa, Homo sapiens; identical to SEQ ID NO: 783

SEQ ID NO: 785 - protein, 106 aa, Homo sapiens; identical to SEQ ID NO: 783

SEQ ID NO: 786 - protein, 129 aa, Homo sapiens
  misc_feature (1)...(129): Xaa = any amino acid or nothing
MLRYVETLLTHMGVNPLEAEELIRDEDSPDFEFIVYDSWKITGRTAENTFNKTHTFHFLLGSIYGECPVPKPRVDRPRKVPVIQEERAMPAHLIPPMSFFDFVGDPHSFPRTVENIFHVSFIIRDGXAE

SEQ ID NO: 787 - protein, 97 aa, Homo sapiens
NLVYISKVRIKKLPCFFRWFMKYQHVDPEEAVRIHTDVQTKKSMAIHWGTFALANEHYLEPPVKLNEALERYGLNAEDFFVLKHGESRYLNNNDENF

SEQ ID NO: 788 - protein, 671 aa, Homo sapiens
MAWRRLSRRRVAGNDRTWPAPQRHWRYTTLFEMKRSKELPVRWCDFSAFTPMMRTHEGNRPGDNWQFDGDAETIAHFARMTTVFTTLKPYLKEAVALNAKSGLPQLVDIREEMPEQTAKRMLSLLGILKYKPSGNATDMGKEHRTLPANFAFNEFVARHLRHRRTVNQLQPGENHLGGGVAVASSFGTSIIATPIAVTPPINLPTIIGKIMAFMLAAAKPKWSPRAKAAETAKAQLMTLPRNSVILFASRLSSHAPAGLQGHINFTISTKILDSNEPCGGQKGFVPQKGRSDTLIKPVLVKDPMVSQGLRCLKNSATSTTNLYTQALLAYIFSLAGEMDIRNILLKQLDQQAIISGFILVTVIKSSNADDTSIYMFYQKVGDNSIDSWKNAGRVFKDSDKFDANDPILKDQTQEWSGCDPQLGCDFVVSEARAFASDHRQAEWSSKDDFMRLGKPILFFGVTAGNMDSMINRYTADRRLRHDDAYTPDNVAGKRPDRATLVYTQRCKEAWKDVPVILGGVGMMCSLSEQGKQLAIQVSNILGMDVCGIDLLMKDDGSFCVCEANANVGYPALGSTMGCSNSGMVTTPIKWLSMISVQCLANGTFLSPSLTKCPKGIRASVPLSGGPRSLKARTFSAFSGQPSSQPSSQPTNYPSTICGHNSGIQPKFQLNG

SEQ ID NO: 789 - protein, 98 aa, Homo sapiens
HASVLPPRSCRVFWIHSGTTMSKVSFKITLTADPRLPYKVLSVAESTPFTAVLNACMQNTVQSLLGRCNHYQPGNTDLALRILESLPLSFWPTENEVI

SEQ ID NO: 790 - protein, 310 aa, Homo sapiens
RTRGRETKPHTKERGMMAKKPPKPGPRRIFQERLKITALPLYFEGFLLIKRSGYREYEHYWTELRGTTLFFYTDKKSIIYVDKLDIVDLTCLTEQNSTEKNCAKFTLVLPKEEVQLKTENTESGEEWRGFILTVTELSVPQNVSLLPGQVIKLHEVLEREKKRRIETEQSTSVEKEKEPTEDYVDVLNPMPACFYTVSRKEATEMLQKNPSLGNMILRPGSDSRNYSITIRQEIDIPRIKHYKVMSVGQNYTIELEKPVTLPNLFSVIDYFVKETRGNLRPFICSTDENTGQEPSMEGRSEKLKKNPHIA

SEQ ID NO: 791 - protein, 58 aa, Homo sapiens
  misc_feature (1)...(58): Xaa = any amino acid or nothing
RWVLLFFLSFVNAVMLCAQVGSHHPALPWASPPECCRDHICPHPVGPPGPPPXPFQPG

SEQ ID NO: 792 - protein, 71 aa, Homo sapiens
GRMAQDLSEKDLLKMEVEQLKKEVKNTRIPISKAGKEIKEYVEAQAGNDPFLKGIPEDKNPFKEKGGCLIS

SEQ ID NO: 793 - protein, 1026 aa, Homo sapiens
ASQAFLRVPALPMDVLPLLVVEDPPTGAARGPGPDPTTHQPPEVAIFAASRVEGGLRPEQENRRDAGRPQIRTPKQGRAEQTRHPARVSSGGGGSQEPTQVNTFMSFIFPMVVISVLNTIIANKLTVMVRQAAEQGQVCTVGGEHSTFSMAIEPGRVQALRHGVRVLRAVVIAFVVCWLPYHVRRLMFCYISDEQWTPFLYDFYHYFYMVTNALFYVSSTINPILYNLVSANFRHIFLATLACLCPAKAQGLCQDTTWEGAQASASRSSAVASRARQKGRRIRGLVSSTCPSGRGQDGDPGSTEHMTSQAPGLRRSPKPKRRQSQEKLAGTSQELGATGSKSRDTCPRTTDTPTTPDLVSLACGQVMMWPRKLALRAMSASVMESGAPEPAPGDGTALTAQTPTPTPTICRPVSLLAQSGTRALDCCPPRAPCLNLSTPRFVPRVGHSVMFKGSLGSVPRRKELEQRGNKADGRAHVRTTREPVPDQFPRPQLSPRRSEGHRRSLHPNRRNTDIDDNIIGMEIQPWNSSSVMEREIWGHWPGSLPQAPLNSSPLKPEPGPTNQVTSRATGDTPSQAQTPANYPGPGARPCQLNPHHLTWFKAHGHREPVCSWAKGQTGPGEVDVSCTYTSSRQEDARRTDGETGWERECDLPVIPEVWLPELELKPEPFTKSSSQDLSWPWMNPVRCLSCLYRGIRALPASHYWTLVKELGDRVAAEGTEPAVSRVQRRTTRQSAKGSVRRSSMGRAPCHFQQGAHREGEPPVKHPSPKSPAGIGCSSLCVETSHSGVFFTQGLHLGVHWGGLSLSRVLHPTHLSLGSHGEQEHRGQQAEGSARAKGTFALASCSPGTRSRTSADPKGVHSGYGPSGVPLKAGRGQDFILFLPPLRAVTNCSPDEVNSMSDGVVPSLPDGVVPSLSDGMVPGLSDGVVPSLSDGVVPGLSDGVVPGLSDGMVPGLSDGVVPSLSDGVVPGLSDGLVPGLFDGVVPSLSEGVVPSLSDGVVPGLSDGLVPGLFDGVVPSLSEDGERS

SEQ ID NO: 794 - protein, 82 aa, Homo sapiens
MPKKAGATTKGKSQSKEPERPLPPLGPVAVDPKGCVTIAIHAKPGSKQNAVTDLTAEAVNVAIAAPPSEGEANAELCRYLSK

SEQ ID NO: 795 - protein, 55 aa, Homo sapiens
TKEQMSGPLFPVCSCPQLPFMLSPCHMHHHPGHVALSQTVSPASLLTQGLGLPQH

SEQ ID NO: 796 - protein, 36 aa, Homo sapiens
  misc_feature (1)...(36): Xaa = any amino acid or nothing
GGGVGGGGGGHLGXDSKGRXGWGPWLAGGDCIKENT

SEQ ID NO: 797 - protein, 421 aa, Homo sapiens
MTRQCQASNQQLGPQPLATTPPDLFLGFQQLFGTFASWGREPHCGGPDFPQPIQTVEDALRKPSGLQLINYIHTYLPLPAKVLDFPPKPPQPGMDVQGFVLYLMSPPASQGHPVPKYQIHRTFRPAPPGGVAGVLVGHPFDTVKVRLQVQSVEKPQYRGTLHCFKSIIKQESVLGLYKGLGSPLMGLTFINALVFGVQGNTLRALGHDSPLNQFLAGAAAGAIQCVICCPMELAKTRLQLQDAGPARTYKGSLDCLAQIYGHEGLRGVNRGMVSTLLRETPSFGVYFLTYDALTRALGCEPGDRLLVPKLLLAGGTSGIVSWLSTYPVDVVKSRLQADGLRGAPRYRGILDCVHQSYRAEGWRVFTRGLASTLLRAFPVNAATFATVTVVLTYARGEEAGPEGEAVPAAPAGPALAQPSSL

SEQ ID NO: 798 - protein, 622 aa, Homo sapiens
RRRFSAGGRSVRRVGESCVRDCNSQHTFLSDQAPSLKSSAIALAMLQDWCRRMGVNAERSLLILDIPDDCEEHEFQEAVRAALSPLGRYRVLIKVFRKELGARAALVEFAEGLNQSLIPRQIAGKGGPWKVISLPQALDAEFQDIPSFPAQPQGQAVARGAGEAGAAGEAGSVGEAGGVNEERSAGEDEAGGIGEAGGVGEAGAAGEAGAAGEAGAAGEAGGAGEAGGAGEAGGAGEEGGTGEEGGAGEAGGAGEEGGEDEAGAAGEAVGAGVVEAWTQSWRQTLRPLVKTMAYRELRPFSGREQPGCVEESFESWLEDAKDMLQLWCHASERERRRRLLDSLDGLALDIVSGLLEEDPDFSAQDCLTALGQVFRSRDTWMTSRMKFLTCTQGPQEGLFAFVVRLEGLLQKAVEKGAVHPAMANHLRLRQVLSRARPSEALQDTLRRMQLERRPPDFLRLLRLIRDMEAWAASLARSQQGVAWAAAPVESEDPAAAQASPAQGDASEADPGAEDADEAASTTKEAARVAPATGEDENAPAGLEGLGQGRSPDAPGGLPARMGSAVDMAPGGPSWEPEGLVQVGGQEAEEPPQEGLKPILEESENEDEDGAGEAGKPKSPPGK

SEQ ID NO: 799 - protein, 493 aa, Homo sapiens
VVLAGSRNRILRTRTFWVGRFSEYCPSCLENDQRWLCNENYKVVEQVPTKKNFSILARNLNTIQVEEMSACNISIQGPSIYNKEPKNIINPHEKVQMKSICANSPIKAQQDQLQVKNNIKASLHNVKSSLPLFNTKSSTSVGQLQSPTLNSPIYMQKQGKNEHLAFNTKSKASTVGSELVLVSTTVPTVHHVSDLEMSSTLDCLPVLADWEDVVLLPASQPEENVDCTVPISDSDLEISFNSGERLMVLKELEMSSHENFGDIEETPQKSETSKSIVYKSPHTTIYNVKEAKDPGSDISAFKLPEHKSSTFNRVNANMSHPLVLGKHPLLSGGTKRNPCSPQAFPPAKKQPFTIHEEKPTSSDCSPVRSSSWRRLPSILTSTVNLQEPWKSGKMTPPLCKCGRRSKRLVVSNNGPNHGKVFYCCPIGKYQENRKCCGYFKWEQTLQKERANSMVPSHSTGGLTFSSPETSHICDRNLSISTKNSLRLRPSMRN

SEQ ID NO: 800 - protein, 424 aa, Homo sapiens
ELIPALTSPLFLEESEKSRAEGAPDTGRGRARGAWRVFPGLSGWSAPPASWPRTPLQMSRRAGVTKMSDPFLKLVFIKDTTFRPKRKLEPGTQRLELHKKAQASLNAGLDLRLAVQLPPGEDLNDWVAVHVVDFFNRVNLIYGTISDGCTEQSCPVMSGGPKYEYRWQDEHKFRKPTALSAPRYMDLLMDWIEAQINNEDLFPTNVGTPFPKNFLQTVRKILSRLFRVFVHVYIHHFDRIAQMGSEAHVNTCYKHFYYFVKEFGLIDTKELEPLVRGLGAEGVRLRWRPRLELGPGDPADGTSGEVAGRDPAFSHGTNAGDRSENADSLASWGSLLPLVSERNDRPDVPLRRPAGLPVPEPPLGPRRLGGGRSGTIIPLLSGLSISGRPGAEPLSRCWSSGAPTRGLQMPSSVSSLSLPSGTKT

SEQ ID NO: 801 - protein, 300 aa, Homo sapiens
CCPCSPRSWPPPARCRPSAAGPRTRPASSGCPPMLQSTRPPRTSPSPRGCWPRRPPGPPSARARRRRRRRRRLCNISVQRQMLSSLLVRWGRPRGFQCDLLLFSTNAHGRAFFAAAFHRVGPPLLIEHLGLAAGGAQQDLRLCVGCGWVRGRRTGRLRPAAAPSAAAATAGAPTALPAYPAAEPPGPLWLQGEPLHFCCLDFSLEELQGEPGWRLNRKPIESTLVACFMTLVIVVWSVAALIWPVPIIAGFLPNGMEQRRTTASTTAATPPQVPAGTTAAAAAAAAAAAAAAVTSGVATK

SEQ ID NO: 802 - protein, 246 aa, Homo sapiens
NNCLWVSCSAVGSERRNVLPCHTHALPCERARERERGRARECASPRRSGTSAAARQRQQLRRRPTQQREARGGCLEEAASRMKCKPNQTRTYDPEGFKKRAACLCFRSEREDEVLLVSSSRYPDRWIVPGGGMEPEEEPGGAAVREVYEEAGVKGKLGRLLGVFEQNQDRKHRTYVYVLTVTELLEDWEDSVSIGRKREWFKVEGMQSKVLKCNKPVKADYLKNLNLGGFPTNWKFMGPFLADSDS

SEQ ID NO: 803 - protein, 750 aa, Homo sapiens
PKIIKRKACLLMILTSPKKREGRAQIVVPVTFRDVTVIFTEAEWKRLSPEQRNLYKEVMLENYRNLLSLENFHSSAEPKPEIYTCSSCLLAFSCQQFLSQHVLQIFLGLCAENHFHPGNSSPGHWKQQGQQYSHVSCWFENAEGQERGGGSKPWSARTEERETSRAFPSPLQRQSASPRKGNMVVETEPSSAQRPNPVQLDKGLKELETLRFGAINCREYEPDHNLESNFITNPRTLLGKKPYICSDCGRSFKDRSTLIRHHRIHSMEKPYVCSECGRGFSQKSNLSRHQRTHSEEKPYLCRECGQSFRSKSILNRHQWTHSEEKPYVCSECGRGFSEKSSFIRHQRTHSGEKPYVCLECGRSFCDKSTLRKHQRIHSGEKPYVCRECGRGFSQNSDLIKHQRTHLDEKPYVCRECGRGFCDKSTLIIHERTHSGEKPYVCGECGRGFSRKSLLLVHQRTHSGEKHYVCRECRRGFSQKSNLIRHQRTHSNEKPYICRECGRGFCDKSTLIVHERTHSGEKPYVCRCMGKAFVITHHRENLHVGTLWSSAQMTFSGVTPQLLERTVLLLAEMHSRDALRSGTHSQPQGAACTTGAMHLCRGTFWPQPLTQRGQLQKVIPDPEIPIELKDHWVADTLQVPPINLIIMAIEFQHEFWRRHSHHSINYAVAPQSGLMREKDVHVWECGPPPFARTAPITPTSDQNWRPLREKKGHYQDLSTPSQKETELKRTRVSLRRKRDANSPLQDYGFGA

SEQ ID NO: 804 - protein, 104 aa, Homo sapiens
TAGFIWLFKHHRFLKKTKQKLTVCPIINGEDHLRLLNFQHNFITRIQNISNLQKLISLDLYDNQIEEISGLSTLRCLRVLLVGKNRIQKNLHLENLKKPKRPWI

SEQ ID NO: 805 - protein, 36 aa, Homo sapiens
SCSGDMAGVKALVALSFSGAIGLTFLMLGCALEDYG

SEQ ID NO: 806 - protein, 445 aa, Homo sapiens
MASSKLREPVDEVFDLDLAVPETARLDSSLHKARAQLLAKGRRHRPSRSRLRDSASSAEDGEGSDGPGGKVTDGCGSPLHRLRSPLHSGPGSPAGGSFCLDPPGLRRSLDEDEPPPSPLTRYRPLHNAASHEGLAAASCSPPRSAPSSDSSPSFVRRHPRAEPHSEDDSRDASPPEPASPTIGLDKKTRRKFLDLGVTLRRASTGKSRKEKGSNRLSMGSRESVEGSGRSGGSPFLPFSWFTDSGKGSASSGSTTSPTCSPKHEGFSPKKSASQAQLLAHAQEALSNSWCLVQDFGSTQIGMESTLSDDSTPPSSSPKIPSGPWQEAKCSYPYHTLSQSSDEFLDEPLPPVHHWTSQQVGQWLQSLNLEQYAAEFAARQVDGPQLLQLDGSKLKSLGLSNSHDRALVKRKLKEMAAAAEKERKAQEKAARQREKLRRREQEAKKS

SEQ ID NO: 807 - protein, 63 aa, Homo sapiens
  misc_feature (1)...(63): Xaa = any amino acid or nothing
KSESGSFADASRCDPAHSQVWWLRGETTSAXEEQREEXRGLRLELRYQLSHSGKEHQASSLGP

SEQ ID NO: 808 - protein, 143 aa, Homo sapiens
  misc_feature (1)...(143): Xaa = any amino acid or nothing
IQSVFVRSSFGLLAVTPACCLLRLISSWVHLSRSLAGLSTLPDQKLSWHAQRNSTHMSRWLRPSRSRIRRISLAHPAKFGFRLMVRXSSPCQTSTLRRSGLLLSPTCCRSELQHPVSPQKGRFLAGQRIRQNSLTNNLFFFLL

SEQ ID NO: 809 - protein, 730 aa, Homo sapiens
MPEPPPAPGSCAARASKTSAAPGSTAPSPIHRSRAEERGTTARNWQAAPTAAPVRDPLGEASWAPESANLVGIWRTFVSSSGIVNAPISTLSKRTNQLSVKQTNRLSVKWTNQQDVARGSATYREGEHGCWLLAPGGFRALQLDNCRDGVCVRDPLRQVLGEAPPLQLACRFPPGTPAASPERGPGAEKRVCGKDVSEVTHCTHDLLHATLEDSWDVSSQLDRQQENWKRHLGSEASTQKKIITPQENFEQNKFGENSRLNTNLVTQLNIPARIRPSECETLGSNLGHNADLLNENNILAKKKPYKCDKCRKAFIHRSSLTKHEKTHKGEGAFPNGTDQGIYPGKKHHECTDCGKTFLWKTQLTEHQRIHTGEKPFECNVCGKAFRHSSSLGQHENAHTGEKPYQCSLCGKAFQRSSSLVQHQRIHTGEKPYRCNLCGRSFRHGTSLTQHEVTHSGEKPFQCKECGKAFSRCSSLVQHERTHTGEKPFECSICGRAFGQSPSLYKHMRIHKRGKPYQSSNYSIDFKHSTSLTQDESTLTEVKSYHCNDCGEDFSHITDFTDHQRIHTAENPYDCEQAFSQQAISHPGEKPYQCNVCGKAFKRSTSFIEHHRIHTGEKPYECNECGEAFSRRSSLTQHERTHTGEKPYECIDCGKAFSQSSSLIQHERTHTGEKPYECNECGRAFRKKTNLHDHQRIHTGEKPYSCKECGKNFSRSSALTKHQRIHTRNKL

SEQ ID NO: 810 - protein, 148 aa, Homo sapiens
  misc_feature (1)...(148): Xaa = any amino acid or nothing
MPILFTTVSSALSGAQHIADAQCDRKGHRTTIQGSRVNLVQPSVGPKVEETQCWGPGRGMPGAPEAPRERRVRSGSRSGDPGVAPRAASGVGGRYAITRGRASAAVPCRSGGARRGGAGGQAADCGPGHXKESESRGPEGPAEGSQPL

SEQ ID NO: 811 - protein, 163 aa, Homo sapiens
LKDVITLRRHVETKVRAKIRKRKVTTKINRHDKINGKRKTARKQKMFQRAQELRRRAEDYHKCKIPPSARKPLCNWVSLFVFLAFEHSLPGQDMDTFFSLQLCAQALQREMAERKAAYSITVPSLLVTVLCKNTFIPTQWAPDLNSKCQRFHICNSKWALTVN

SEQ ID NO: 812 - protein, 163 aa, Homo sapiens; identical to SEQ ID NO: 811

SEQ ID NO: 813 - protein, 163 aa, Homo sapiens; identical to SEQ ID NO: 811

SEQ ID NO: 814 - protein, 163 aa, Homo sapiens; identical to SEQ ID NO: 811

SEQ ID NO: 815 - protein, 1271 aa, Homo sapiens
  misc_feature (1)...(1271): Xaa = any amino acid or nothing
MVGELRYREFRVPLGPGLHAYPDELIRQRVGHDGHPEYQIRWLILRRGDEGDGGSGQVDCKAEHILLWMSKDEIYANCHKMLGEDGQVIGPSQESAGEVGALDKSVLEEMETDVKSLIQRALRQLEECVGTIPPAPLLHTVHVLSAYASIEPLTGVFKDPRVLDLLMHMLSSPDYQIRWSAGRMIQALSSHDAGTRTQILLSLSQQEAIEKHLDFDSRCALLALFAQATLSEHPMSFEGIQLPQVPGRVLFSLVKRYLHVTSLLDQLNDSAAEPGAQNTSAPEELSGERGQLELEFSMAMGTLISELVQAMRWDQASDRPRSSARSPGSIFQPQLADVSPGLPAAQAQPSFRRSRRFRPRSEFASGNTYALYVRDTLQPGMRVRMLDDYEEISAGDEGEFRQSNNGVPPVQVFWESTGRTYWVHWHMLEILGFEEDIEDMVEADEYQGAVASRVLGRALPAWRWRPMTELYAVPYVLPEDEDTEECEHLTLAEWWELLFFIKKLDGPDHQEVLQILQENLDGEILDDEILAELAVPIELAQDLLLTLPQRLNDSALRDLINCHVYKKYGPEALAGNQAYPSLLEAQEDVLLLDAQAQAKDSEDAAKVEAKEPPSQSPNTPLQRLVEGYGPAGKILLDLEQALSSEGTQENKVKPLLLQLQRQPQPFLALMQSLDTPETNRTLHLTVLRILKQLVDFPEALLLPWHEAVDACMACLRSPNTDREHPVHRVHSGTCYCSAPVAFALFHSSPPLCPHPGAPGTDFFLHRLTSVSRDYAVVLNQLGARDAISKALEKHLGKLELAQELRDMVFKCEKHAHLYRKLITNILGGCIQMVLGQIEDHRRTHQPINIPFFDVFLRYLCQGSSVEVKEDKCWEKVEVSSNPHRASKLTDHNPKTYWESNGSAGSHYITLHMRRGILIRQLTLLVASEDSSYMPARVVVCGGDSTSSLHTELNSVNVMPSASRVILLENLTRFWPIIQIRIKRCQQGGIDTRIRGLEILGPKPTFWPVFREQLCRHTRLFYMVRAQAWSQDMAEDRRSLLHLSSRLNGALRQEQNFADRFLPDDEAAQALGKTCWEALVSPVVQNITSPDEDGISPLGWLLDQYLECQEAVFNPQSRGPAFFSRVRRLTHLLVHVEPCEAPPPVVATPRPKGRNRSHDWSSLATRGLPSSIMRNLTRCWRAVVEKQVNNFLTSSWRDDDFVPRYCEHFNILQNSSSELFGPRAAFLLALQNGCAGALLKLPFLKAAHEQQEMAQQERKQQQELHLALKQEX

SEQ ID NO: 816 - protein, 45 aa, Homo sapiens
ILKVVSDFFARSWKNTFHFQILHKGLSLHHGLEDAYDVASRGSFH

SEQ ID NO: 817 - protein, 279 aa, Homo sapiens
GKRLLGPQWLDYDCDRAVIEDWVFRVPHVAIFLSVVICKGFLVLCSSLDLTTLVPERQVDQGRGFESILDVLSVMYINAQLPREQRHRWRLLFSSELHGHSFSQLCGHITHRGPCVAVLEDHDKHVFGGFASCSWEVKPQFQGDNRCFLFSICPSMAVYTHTGYNDHYMYLNHGQQTIPNGLGMGGQHNYFGLWVDVDFGKGHSRAKPTCTTYNSPQLSAQENFQFDKMEVWAVGDPSEEQLAKGNKSILDADPEAQALLEISGHSRHSEGLREVPDDE

SEQ ID NO: 818 - protein, 131 aa, Homo sapiens
  misc_feature (1)...(131): Xaa = any amino acid or nothing
QYGLYNGGGAIMAALHESFTSCLNYGGPQKFSPEGDLCSSPDPKICYVCKKSFKSSYSVKLHYRNVHLKEMHVCTVAGCNAAFPSRRSRDRKDXKADLIVTRHSANINLHRKLLTKELDDMGLDSSQPSLS

SEQ ID NO: 819 - protein, 97 aa, Homo sapiens
LWPSRPTTDPLQPRPADPGLRRLPPDSPSPSRPARPTLCPFSPAARFPVAPSSALASSEDLQPPSPSSSGSGLPGQAPPCYAPTYFPPGEEPPPYAP

SEQ ID NO: 820 - protein, 109 aa, Homo sapiens
HEVRFFVVDCRPAEQYGAGHLSTAFHLDSDLMLQNPSEFAQSVKSLLEAQKQSIESGSIAGGEHLCFMGSGREEEDMYMNMVLAHFLQKNTEYVSIASGGFMALQQHLA

SEQ ID NO: 821 - protein, 155 aa, Homo sapiens
TVLCATGGGAYKFEKDFRTIGNLHLHKLDELDCLVKGLLYIDSVSFNGQAECYYFANASEPERCQKMPFNLDDPYPLLVVNIGSGVSILAVHSKDNYKRVTGTSLGGGTFLGLCSLLTGCESFEEALEMASKGDSTQADKLVRDIYGGDYERFGL

SEQ ID NO: 822 - protein, 124 aa, Homo sapiens
WYVVPPEHGQRLDRLARELFPGSSRCCGAFLRHKVALISPTVLKENGIPFNRITQEAGEFMETFPYGYHAGFNHGFNCAEAINFATPRWIDYGKMASQCICGKARVTFSMDAFVRILQPERYDL

SEQ ID NO: 823 - protein, 105 aa, Homo sapiens
  misc_feature (1)...(105): Xaa = any amino acid or nothing
MMGLRLQLXXXXXXXXXXXXXXXXXXXXXXXXXXXXXXXXXXXXXXXXXXXXXXXXXXXXXXXXXXXXXXXXXXXXXXXXXXXXXXXXXXXXXXXXXXXXXXXXX

SEQ ID NO: 824 - protein, 92 aa, Homo sapiens
  misc_feature (1)...(92): Xaa = any amino acid or nothing
DGPGCWGFRRRWPEASWRDSARWHGCRSPGGPGPARPPCPAXGGCAXCGLTARPPQTAYYTWCRTPPAWRSATVTRTPCXGCPGPAGAPSAA

SEQ ID NO: 825 - protein, 134 aa, Homo sapiens
GPDAGWGDRIPLEILVQIFGLLVAADGPMPFLGRAARVCRRWQEAASQPALWHTVTLSSPLVGRPAKGSVKAEKKLLASLEWLMPNRFSQLQRLTLIHWKSQLVGECCPRLTFLKLSGCHGVTADALVMLAKAC

SEQ ID NO: 826 - protein, 79 aa, Homo sapiens
SVIFVFYSMFQDACELDVIEISLFVNRCFSVQLIHFLICKLIPHGCHQLSQVIFLNGACCFFIKASRSISDDIFRICAI

SEQ ID NO: 827 - protein, 119 aa, Homo sapiens
  misc_feature (1)...(119): Xaa = any amino acid or nothing
SERYLSNPTPPVPPXSAVYLSNPTPHVPPXSDRYLSNPSPPVPPXSNRYLSNPTTPVPRXSDRYMYNNTPPVPPXSERYLSNPTPPVPPXYDRYLSNRTPHVSPXYDRYLSNPTPPVSP

SEQ ID NO: 828 - protein, 144 aa, Homo sapiens
  misc_feature (1)...(144): Xaa = any amino acid or nothing
VTPEKQHEQWIPHSSIRQQNQQPKEQWSXYPAPQSGSPLTIMEGTVVVQQLMSVMISKHDCLFPKDAELQSKPQDGVSNNNEIQKKATMGQLQNKENNNTKDSPSRQCSWDKSESPQRNSMNNGSPTALSGSKTNSPKNSGHKL

SEQ ID NO: 829 - protein, 485 aa, Homo sapiens
MKENFKHRHVVAFISSQEAQEDSREEEDRLESRFYFLFLLELSYKTTGLNREPTVSLNSKSGTPMDQNEHSHWGPHAKGQCASRSELRIILVGKTGTGKSAAGNSILRKQAFESKLGSQTLTKTCSKSQGSWGNREIVIIDTPDMFSWKDHCEALYKEVQRCYLVAGPKPHVLLLVTQLGRYTSQDQQAAQRVKEIFGEDAMGHTIVLFTHKEDLNGGSLMDYMHDSDNKALSKLVAACGGRICAFNNRAEGSNHDDQVKELMDCIEDLLMEKNGDHYTNGLYSLIQRSKCGPVGSDERVKEFKQSLIKYMETQRSYTALAEANCLKGALIKTQLPKVDKTTKIGKKQSRKTGNSKKQSTSPPPKERSSSPAMEQSWTENDFDELREEGFRRSHYSELPEDIQTEGREVENFEKSLEECITRITHTEKCLKELMELKTKARELREECRSLRSQCDQLEERVSAMEDEMNEMKREGKFKEKKNKKK

SEQ ID NO: 830 - protein, 384 aa, Homo sapiens
APPVPANALGARGEAVRLQLQGEELRLQEESVRLHQINIYLSDRISLHRRLPVRWNPLCKEKKYDYDNLPRTSVIIAFYNEAWSTLLRTVYSVLETSPDILLEEVILVDDYSDREHLKERLANELSGLPKVRLIRANKREGLVRARLLGASAARGDVLTFLDCHCECHEGWLEPLLQRIHEEESAVVCPVTDVIDWNTFEYLGNSGEPQIGGFDWRLVFRWHTVPERERIRMQSPVDVIRSPTMAGGLFAVSKKYFEYLGSYDTGMEVWGGENLEFSFRIWQCGGVLETHPCSHVGHVFPKQAPYSRNKALANSVRAAEVWMDEFKELYYHRNPRARLEPFGDVTERKQLRDKLQCKDFKWFLETVYPELHVPEDRPGFFGMLQ

SEQ ID NO: 831 - protein, 24 aa, Homo sapiens
  misc_feature (1)...(24): Xaa = any amino acid or nothing
XFCFLLADMIMQSGDAISGFPVCL

SEQ ID NO: 832 - protein, 591 aa, Homo sapiens
MPVLPVTATEIRQYLRGHGIPFQDGHSCLRALSPFAESSQLKGQTGVTTSFSLFIDKTTGHFLCMTSLAEGSWEDFQASVEGRGDGAREGFLLSKAPEFEDSEEVRRIWNRAIPLWELPDQEEVQLADTMFGLTKVTDDTLKRFSVRYLRPARSLVFPWFSPGGSGLRGLKLLEAKCQGDGVSYEETTIPRPSAYHNLFGLPLISRRDAEVVLTSRELDSLALNQSTGLPTLTLPRGTTCLPPALLPYLEQFRRIVFWLGDDLRSWEAAKLFARKLNPKRCFLVRPGDQQPRPLEALNGGFNLSRILRTALPAWHKSIVSFRQLREEVLGELSNVEQAAGLRWSRFPDLNRILKGHRKGELTVFTGPTGSGKTTFISEYALDLCSQGVNTLWGSFEISNVRLARVMLTQFAEGRLEDQLDKYDHWADRFEDLPLYFMTFHGQQNIRTVIGTMNHAVYVYDICHVIIDNLQFMMGHEQLSTDRIAAQDYIIGVFRKFATDNNCHVTLVIHPRKEDDDKELQTASIFGSAKGGEWSAPHSTSSRPSAQPKSDSTVAEAAPLASDFTAYWIWFLTWGRGRASRDREFGYLAALN

SEQ ID NO: 833 - protein, 152 aa, Homo sapiens
ADRPWHEPGAGCAADCEDPHRRPGACEPGAPPAARAAGLGRGTRHGNGDILSFEDANRAMQTGVTGIMIARGALLKPWLFTEIKEQRHWDISSSERLDILRDFTNYGLEHWGSDTQGVEKTRRFLLEWLSFLCRYVPVGLLERLPQRINERP

SEQ ID NO: 834 - protein, 113 aa, Homo sapiens
TGMDYLQVGVTSQKTMKLIPASRHRATQKVVIGDHDGVVMCFGMKKGEAAAVFKTLPGPKIARLELGGVINTPQEKIFIAAASEIRGFTKKGKQFLSFETNLTESIKAMYVKC

SEQ ID NO: 835 - protein, 74 aa, Homo sapiens
TMGLEKPQSKLEGGMHPQLIPSVIAVVFILLLGVCFIASCLVTHHNFSRWKRGTGVHKLKHHAKLKCIKEKSEL

SEQ ID NO: 836 - protein, 41 aa, Homo sapiens
GRFLSLSHFCPPAPTSQVRPWALELRDSPHPSPTPAPSLML

SEQ ID NO: 837 - protein, 140 aa, Homo sapiens
NWAGAQRLTMTHGSCLPQLSDKVAPAKHWRPKPRSITPIVTPPISSASAVKGKREKGSEALVPPHLVGRYASSRSHPSQGGEGRPQAGCGHSWLTLSSATDRLSHSWAGLNPRCPPAATWPPCSTFSPFASSGCRQPSSF

SEQ ID NO: 838 - protein, 130 aa, Homo sapiens
QLMGADLCRIKMKKHLTTFLVILWLYFYRGNGRYQPELSPQPLIILEGKNCSLRCIYTASPFTSLWRYNHDTGRGPVSLTIMTFSENTKPNGRYTATLDADTKQSSLHITAYQLIDSASYICVVSALCST

SEQ ID NO: 839 - protein, 76 aa, Homo sapiens
  misc_feature (1)...(76): Xaa = any amino acid or nothing
HPVKHIIRPPKHTSGKKPNKRVTRKNSIFMDEVXPRKIEVEFQEEVVIRGMMPWSTSCSLVLLCCSLSWSTQIVNF

SEQ ID NO: 840 - protein, 82 aa, Homo sapiens
MTLGITSFISFYFCFIIYIFQYLIIGKKNLTFSVLKFFIIKYISLIIISKEEKNTFKISHWIWKIIIMELWFLMSTHISFRY

SEQ ID NO: 841 - protein, 306 aa, Homo sapiens
  misc_feature (1)...(306): Xaa = any amino acid or nothing
PTPHRGAFGRLPEPGLVQPQLPVGPAPGLGGPQRSTHPPDGPAPQGGPVPAAGAHPQTHLHHLRGPEARPRRPGGPPAAPQRATWXPCCSGGPAPXLLPPIFGKKCSWRCRGKVQYRPVEGDPQTQLQDDKDPMLILRGPSPXGPGPGTSEVDPDPXRRTWVSGGLFLESHQAPPPPGGLAGREPEQRSGRLGSRPRETTVPRTDFYLPWCQRMNMXLPPQSGRIIGTAGARAAASLLCSTGPQPLPAALGPCQQPWDPASSPGKRLWPQGPPSARKXSPGKRLWPQGASQCQKIKSFWILKKKKK

SEQ ID NO: 842 - protein, 189 aa, Homo sapiens
  misc_feature (1)...(189): Xaa = any amino acid or nothing
LKILSKMKIHQGGYNSDENACVHQHRVRALTGSMCKSKPGSPAPGGRXNLPSREPGAPAGIGGSFLASAAVSPSPPSPHXCPLEXEPVAEAEGLLGELSKVWKEGPPERAPGXPPRGPPGLHQLHASQMLFIGRPGGPGQISPAPGCGGLEGCLSRHCAIAGAGERISETTFGSNALYHRSPNRLGQGL

SEQ ID NO: 843 - protein, 170 aa, Homo sapiens
MEVAVSRIMTLHSSLGDRARLHLKKKKEEEEKEEEEEEEEEKKKEEKEKEKKKEKMMRRRKKTKNNTKQNKTCSKQQALLRKEKNFHKKRWPAAPGVTARYATSKGDVSAAASTLPVKTPAPIQRRGEVSTIHLSQVVQWQWGPHALYTVVVLLEEGEQLSPGDLGTGFI

SEQ ID NO: 844 - protein, 213 aa, Homo sapiens
  misc_feature (1)...(213): Xaa = any amino acid or nothing
VQPLGDAGMPXDGQRAAPRSPALGARALAQGSTGATAGASRKQEVAAGPAGHRLVSTAAAGGGPSLRQVCSAGPPGRAVRSGGRGQVRETPPGCLGGAWHPREPNGHSAFRFRPAGPIGVLGPQPGPPGKXPCTKAFPPLPPNATAKAGPPPRCFPCQPCLILGPPSPPGTLEGPIPLSETLPTPHSSALGAIFAQGGGDGGAGATEPAHLNL

SEQ ID NO: 845 - protein, 164 aa, Homo sapiens
  misc_feature (1)...(164): Xaa = any amino acid or nothing
GLFQKPGGTHVLPPAPKAVQASTDPPLKGGSPLLQGPWRRGRVGCRGAQKGGPGDRGSSLLFKPGDQGGPSLTSGQHSKSEAGVWQGLSWSPLGCGFLPEPHQRPLEPREGPRRAGVTPGLEHSSQSPEAPGDRNKXQSETTREKESTVSTKSPTLPKHPGQLG

SEQ ID NO: 846 - protein, 158 aa, Homo sapiens
IKMSGKANASKKNAQQLKRNPKRKKDNEEVVLSENKVRNTVKKNKNHLKDLSSEGQTKHTNLKHGKTAASKRKTWQPLSKSTRDHLQTMMESVIMTILSNSIKEKEEIQYHLNFLKKRLLQQCETLKVPPKKMEDLTNVSSLLNMERARDKANEEGLA

SEQ ID NO: 847 - protein, 133 aa, Homo sapiens
SPRTGGGGGFQSPAPAGERTMHCLGAEYLVSAEGAPRQREWRPQIYRKCTDTAWLFLFFLFWTGLVFIMGYSVVAGAAGRLLFGYDSFGNMCGKKNSPVEGAPLSGQDMTLKKHVFFMNSCNLEVKGTQLNRM

SEQ ID NO: 848 - protein, 118 aa, Homo sapiens
MAFLWLVCCFALVGATFGCGVPAIQPGLTGLSRIVNGEDAIPGSWPWQESLQDRTGFHFCGGSLISENWVVTAAHCGVKTTDVVVAGEFDQGSDEKNVQVLKIVQVFKNPKFNSFTVR

SEQ ID NO: 849 - protein, 152 aa, Homo sapiens
PGRPTRPTSPSNTPASISPKLNVEVKKEVDKEKAVTDEKPKQKDKPGEEEEKCDISSKYHYLTENDLEESPKGGLDILKSLENTVTSAINKAQNGTPSWGGYPSIHAAYQLPNMMKLSLGSSGKSTPLKPMFGNSEIVSPTKNQTLVSPPSS

SEQ ID NO: 850 - protein, 98 aa, Homo sapiens
LQVEIYKTVKMHCIWHKQMVSSYFFYQKKNELSNFEEVFLKTASGMFFSTVGCHPTRCGEFEKNNPDLYLKELLNLAENNKGKVVAIGECGLDFDRLQ

SEQ ID NO: 851 - protein, 156 aa, Homo sapiens
DGSIMASMQKRLQKELLALQNDPPPGMTLNEKSVQNSITQWIVYMEGAPCTLYEGEKFQLLFKCRRRYPFDSSQGMFTGENITDHPHVYSNGHMCLSILTKNWFPALSVQSVCLSIISMLSSCKEKTTDHPDNSFYVRTCNKNPKKTKWWYHDDTC

SEQ ID NO: 852 - protein, 94 aa, Homo sapiens
  misc_feature (1)...(94): Xaa = any amino acid or nothing
AAAEAKKSVCRRLDYITQSLQQQGVQAENITVTKDFRRVENAYHMEAEKLLRRGGVXLXSQLPGRLKQKKRSNLGGRAYSEPRSHHCTSAWVTK

SEQ ID NO: 853 - protein, 106 aa, Homo sapiens
  misc_feature (1)...(106): Xaa = any amino acid or nothing
NTLPPWFXLPSFSAAASVQRPPAPPALASPSTCPAASAPAPAGCARGRRAAAACEARPALLPPPAPPARRRRRPGSPRALCSGSARGRSQGRCAGTGGGLCGMWGP

SEQ ID NO: 854 - protein, 106 aa, Homo sapiens; identical to SEQ ID NO: 853
  misc_feature (1)...(106): Xaa = any amino acid or nothing

SEQ ID NO: 855 - protein, 261 aa, Homo sapiens
GRVGEAQHYLSKTPESSAQPSETILWDVQTDSNPNQEKDSSSNEKQTISLPVSTSKSRKESTEPKTCIESMEKKTDSLVQNGNERSDDTVSNISLIDQKMPDIEPNSENNCSSSDIVNGHSEIEQTPLVSSDPALKIDTNRIRTENGSILPSVVPQEHNTLPVSQAPSKPNLTSEHTSYGLILTKPYVRPLPPSYLDERYLSMPKRRKFLTDRVDACSDQDNVYKKSVKRLRCGKCLTTYCNAEALEAHLAQKKCQTLFGI

SEQ ID NO: 856 - protein, 199 aa, Homo sapiens
  misc_feature (1)...(199): Xaa = any amino acid or nothing
PRVRERGVSDSCCQQAPGQSEKEGQIPSNPSGASXHSLPMPRCXATVSHRSLCPEWPAPRPCNSPSPSPQEPPQPPPLWPLLGVILAPQNVTWSVWCAGSPTAVPGCPSCWPASMPSAPSAXSSCCACRTTPGPSPARCAARSPPSPGASSAACATMRRWWGSWPSHAQRYRSVLRGWWILLTWQQDTPAWWERMDRMK

SEQ ID NO: 857 - protein, 269 aa, Homo sapiens
RVLELQPVTLLLGDHGWVEHVDNGIRYKLDVTQCMFSFGNITEKLRVASLSCAGEVLVDLYAGIGYYTLPFLVHAGAAFVHACEWNPHAVVALRNNLEINAVADRCQIHFGDNRKLKLSNIADRVILGLIPSSEEGWPIACQVLRQDAGGILHIHQNVESFPGKNLQALGVSKVEKEHWLYPQQITTNQWEKWELPGILGEKLLSPATKPQLAKVGRICRNSNRHSSSAGAWETMEDTNSAHPTSEILCSPCGSHSPGSGMLPLSFSWL

SEQ ID NO: 858 - protein, 353 aa, Homo sapiens
ASRCVAPGRGAPASPHDVDLCLVSPCEFEHRKAVPMAPAPASPGSSNDSSARSQERAGGLGAEETPPTSVSESLPTLSDSDPDCPSAPGAADSDEDTEGFGVPRHDPLPDPLKVPPPLPDPSSICMVDPEMLPPKTARQTENVSRTRKPLARPNSRAAAPKATPVAAAKTKGLAGGDRASRPLSARSEPSEKGGRAPLSRKSSTPKTATRGPSGSASSRPGVSATPPKVPVYLDLAYLHSGSSAHLVDEEFFQRVRALCYVISGQDQRKEEGMRAGPDAATGQQSSIWDRDLQVRVTPGPLVVTLIPTFDSVAMHTWYAETHARHQALGITVLGSNSMVSMQDDAFPACKVEF

SEQ ID NO: 859 - protein, 247 aa, Homo sapiens
  misc_feature (1)...(247): Xaa = any amino acid or nothing
FWSGPALGPSPLSGEGDMVATDETVCVCSGCEGAPDPGSXPQPAPDQRLGQCPVWLPVTXPTSTRGTWTASWPXLTDSSVTGPTSXSLXCSGREKRRQWAQPWTMATSDSSRTGGLPAAPSTADASRARDVPGAEAAPGVHGLAATAGCLCQGEPVGPHVAVPVQESGADPQPQDEEEGPQPAQGPGCEGAEGKFPSSSSATSVAAPSGSASCPALAATGSXPAASTARPRPGPSSTRRTAGTWWPS

SEQ ID NO: 860 - protein, 75 aa, Homo sapiens
KLATPPAAQESSRRRSRKGHLPAPVQPYEHGYPVSGGFAMPPVSLYHILTTSFSSHAVDISLDMCCFILLLPSLL

SEQ ID NO: 861 - protein, 69 aa, Homo sapiens
KRREENRGQTLQFTDAIPDKMPRAWPGAVTHACNPSTLGGRGRRMTRSGDRDHRGQHGETPSLLKIQKK

SEQ ID NO: 862 - protein, 275 aa, Homo sapiens
QKNTHYMMIFDAFVILTCLVSLILCIRSVIRGLQLQQEFVNFFLLHYKKEVSVSDQMEFVNGWYIMIIISDILTIIGSILKMEIQAKSLTSYDVCSILLGTSTMLVWLGVIRYLGFFAKYNLLILTLQAALPNVIRFCCCAAMIYLGYCFCGWIVLGPYHDKFRSLNMVSECLFSLINGDDMFATFAKMQQKSYLVWLFSRIYLYSFISLFIYMILSLFIALITDTYETIKQYQQDGFPETELRTFISECKDLPNSGKYRLEDDPPVSLFCCCKK

SEQ ID NO: 863 - protein, 116 aa, Homo sapiens
PCCSHPNAVLGVQQTLEEMDFQRGIWSAALNGDLGRVKHLIQKAEDPSQPDSAGYTALHYASRNGHYAVCQFLLESGAKCDAQTHGGATALHRASYCGHTEIGRLLLSHGSNPKVG

SEQ ID NO: 864 - protein, 116 aa, Homo sapiens; identical to SEQ ID NO: 863

What is claimed is:

1. An isolated polynucleotide comprising a nucleotide sequence selected from the group consisting of SEQ ID NO: 1-216, or 433-648, a mature protein coding portion of SEQ ID NO: 1-216, or 433-648, an active domain coding portion of SEQ ID NO: 1-216, or 433-648, and complementary sequences thereof.

2. An isolated polynucleotide encoding a polypeptide with biological activity, wherein said polynucleotide hybridizes to the polynucleotide of claim 1 under stringent hybridization conditions.

3. An isolated polynucleotide encoding a polypeptide with biological activity, wherein said polynucleotide has greater than about 90% sequence identity with the polynucleotide of claim 1.

4. The polynucleotide of claim 1 wherein said polynucleotide is DNA.

5. An isolated polynucleotide of claim 1 wherein said polynucleotide comprises the complementary sequences.

6. A vector comprising the polynucleotide of claim 1.

7. An expression vector comprising the polynucleotide of claim 1.

8. A host cell genetically engineered to comprise the polynucleotide of claim 1.

9. A host cell genetically engineered to comprise the polynucleotide of claim 1 operatively associated with a regulatory sequence that modulates expression of the polynucleotide in the host cell.

10. An isolated polypeptide, wherein the polypeptide is selected from the group consisting of:
(a) a polypeptide encoded by any one of the polynucleotides of claim 1; and
(b) a polypeptide encoded by a polynucleotide hybridizing under stringent conditions with any one of SEQ ID NO: 1-216, or 433-648.

11. A composition comprising the polypeptide of claim 10 and a carrier.

12. An antibody directed against the polypeptide of claim 10.

13. A method for detecting the polynucleotide of claim 1 in a sample, comprising:
a) contacting the sample with a compound that binds to and forms a complex with the polynucleotide of claim 1 for a period sufficient to form the complex; and
b) detecting the complex, so that if a complex is detected, the polynucleotide of claim 1 is detected.

14. A method for detecting the polynucleotide of claim 1 in a sample, comprising:
a) contacting the sample under stringent hybridization conditions with nucleic acid primers that anneal to the polynucleotide of claim 1 under such conditions;
b) amplifying a product comprising at least a portion of the polynucleotide of claim 1; and
c) detecting said product and thereby the polynucleotide of claim 1 in the sample.

15. The method of claim 14, wherein the polynucleotide is an RNA molecule and the method further comprises reverse transcribing an annealed RNA molecule into a cDNA polynucleotide.

16. A method for detecting the polypeptide of claim 10 in a sample, comprising:
a) contacting the sample with a compound that binds to and forms a complex with the polypeptide under conditions and for a period sufficient to form the complex; and
b) detecting formation of the complex, so that if a complex formation is detected, the polypeptide of claim 10 is detected.

17. A method for identifying a compound that binds to the polypeptide of claim 10, comprising:
a) contacting the compound with the polypeptide of claim 10 under conditions sufficient to form a polypeptide/compound complex; and
b) detecting the complex, so that if the polypeptide/compound complex is detected, a compound that binds to the polypeptide of claim 10 is identified.

18. A method for identifying a compound that binds to the polypeptide of claim 10, comprising:
a) contacting the compound with the polypeptide of claim 10, in a cell, under conditions sufficient to form a polypeptide/compound complex, wherein the complex drives expression of a reporter gene sequence in the cell; and
b) detecting the complex by detecting reporter gene sequence expression, so that if the polypeptide/compound complex is detected, a compound that binds to the polypeptide of claim 10 is identified.

19. A method of producing the polypeptide of claim 10, comprising,
a) culturing a host cell comprising a polynucleotide sequence selected from SEQ ID NO: 1-216, or 433-648, a mature protein coding portion of SEQ ID NO: 1-216, or 433-648, an active domain coding portion of SEQ ID NO: 1-216, or 433-648, complementary sequences thereof and a polynucleotide sequence hybridizing under stringent conditions to SEQ ID NO: 1-216, or 433-648, under conditions sufficient to express the polypeptide in said cell; and
b) isolating the polypeptide from the cell culture or cells of step (a).

20. An isolated polypeptide comprising an amino acid sequence selected from the group consisting of any one of the polypeptides SEQ ID NO: 217-432, or 649-864, the mature protein portion thereof, or the active domain thereof.

21. The polypeptide of claim 20 wherein the polypeptide is provided on a polypeptide array.

22. A collection of polynucleotides, wherein the collection comprising the sequence information of at least one of SEQ ID NO: 1-216, or 433-648.

23. The collection of claim 22, wherein the collection is provided on a nucleic acid array.

24. The collection of claim 23, wherein the array detects full-matches to any one of the polynucleotides in the collection.

25. The collection of claim 23, wherein the array detects mismatches to any one of the polynucleotides in the collection.

26. The collection of claim 22, wherein the collection is provided in a computer-readable format.

27. A method of treatment comprising administering to a mammalian subject in need thereof a therapeutic amount of a composition comprising a polypeptide of claim 10 or 20 and a pharmaceutically acceptable carrier.

28. A method of treatment comprising administering to a mammalian subject in need thereof a therapeutic amount of a composition comprising an antibody that specifically binds to a polypeptide of claim 10 or 20 and a pharmaceutically acceptable carrier.
